(19) United States
(12) Patent Application Publication
(10) Pub. No.: US 2024/0301064 A1
(43) Pub. Date: Sep. 12, 2024

(54) PD-1 ANTIBODIES, POLYPEPTIDES AND USES THEREOF

(71) Applicant: PANDION OPERATIONS, INC., Watertown, MA (US)

(72) Inventors: Joanne L. VINEY, Belmont, MA (US); Nathan HIGGINSON-SCOTT, Hingham, MA (US); Kevin OTIPOBY, Ashland, MA (US); Salvatore ALIOTO, Somerville, MA (US); Lindsay EDWARDS, Littleton, MA (US)

(73) Assignee: PANDION OPERATIONS, INC., Watertown, MA (US)

(21) Appl. No.: 18/547,183

(22) PCT Filed: Feb. 23, 2022
(86) PCT No.: PCT/US2022/070791

§ 371 Date: Aug. 21, 2023

Related U.S. Application Data
(60) Provisional application No. 63/152,701, filed on Feb. 23, 2021.

(51) Int. Cl. C07K 16/28; A61K 39/00; A61P 37/04

(52) U.S. Cl. CPC C07K 16/2818; A61P 37/04; A61K 2039/505; C07K 2317/31; C07K 2317/522; C07K 2317/524; C07K 2317/526; C07K 2317/55; C07K 2317/565; C07K 2317/75; C07K 2317/92

(57) ABSTRACT

Polypeptides for binding to PD-1 and compositions comprising the same, such as targeting to a cell expressing MAdCAM, which can be used, for example as methods and compounds for conferring site-specific or local immune privilege.

### CROSS-REFERENCE TO RELATED APPLICATIONS

[0001] This application claims priority to U.S. Provisional Application No. 63/152,701, filed on Feb. 23, 2021, which is hereby incorporated by reference in its entirety.

### SEQUENCE LISTING

[0002] The instant application contains a Sequence Listing which has been submitted electronically in ASCII format and is hereby incorporated by reference in its entirety. Said ASCII copy, created on Feb. 10, 2022, is named 145256_001802_SL.txt and is 896,475 bytes in size.

### FIELD

[0003] The embodiments provided herein relate to, for example, methods and compositions for local or targeted immune-privilege.

### BACKGROUND

[0004] Instances of unwanted immune responses, e.g., as in the rejection of transplanted tissue or in autoimmune disorders, constitute a major health problem for millions of people across the world. Long-term outcomes for organ transplantation are frequently characterized by chronic rejection, and eventual failure of the transplanted organ. More than twenty autoimmune disorders are known, affecting essentially every organ of the body, and affecting over fifty million people in North America alone. The broadly active immunosuppressive medications used to combat the pathogenic immune response in both scenarios have serious side effects. Programmed cell death protein 1 (PD-1) is an inhibitory immune checkpoint molecule present on the surface of T cells, and others. PD-1 binds to two ligands, PD-L1 and PD-L2, minimizing or preventing activation and function of said T cells. PD-1 targeted therapies have emerged as ways of providing local or targeted immune privilege. The present disclosure provides for methods and compounds that provide local or targeted immune privilege.

### SUMMARY

[0005] The present disclosure related to anti-PD-1 antibodies, polypeptides, and uses thereof. In some embodiments, antibodies, or antigen binding fragments thereof, comprising a heavy chain variable region and a light chain variable region, are provided. In some embodiments, the antibody, or antigen binding fragment thereof, comprises the heavy chain variable region comprises a variable heavy CDR1 (HCDR1) having at least one amino acid substitution relative to SEQ ID NO: 1709, or 1719; a variable heavy CDR2 (HCDR2) having at least one amino acid substitution relative to SEQ ID NO: 1712, or 1744; and variable heavy CDR3 (HCDR3) having at least one amino acid substitution relative to SEQ ID NO: 1715, or 1724; and the light chain variable region comprises a variable light CDR1 (LCDR1) having at least one amino acid substitution relative to SEQ ID NO: 1716, or 1726; a variable light CDR2 (LCDR2) having at least one amino acid substitution relative to SEQ ID NO: 1717, or 1728; and a variable light CDR3 (LCDR3) having at least one amino acid substitution relative to SEQ ID NO: 1718, or 1729.

[0006] In some embodiments, the antibody, or antigen binding fragment thereof, comprises the heavy chain variable region comprises a variable heavy CDR1 (HCDR1) having an amino acid sequence of SEQ ID NO: 1719; a variable heavy CDR2 (HCDR2) having an amino acid sequence of SEQ ID NO: 1744; and variable heavy CDR3 (HCDR3) having an amino acid sequence of SEQ ID NO: 1724; and the light chain variable region comprises a variable light CDR1 (LCDR1) having an amino acid sequence of SEQ ID NO: 1726; a variable light CDR2 (LCDR2) having an amino acid sequence of SEQ ID NO: 1728; and a variable light CDR3 (LCDR3) having an amino acid sequence of SEQ ID NO: 1729.

[0007] In some embodiments, the antibody, or antigen binding fragment thereof, comprises a light chain variable region comprising an amino acid sequence having at least 90% identity to an amino acid sequence selected from SEQ ID NOs: 1359, 1680, 1681, 1682, 1683, 1684, 1479, 1449, 1687, 1688, 1689, 1690, 1691, 1692, 1693, 1694, 1695, 1696, 1697, 1698, 1699, 1700, 1701, 1702, 1703, 1704, 1705, or 1706; and a heavy chain variable region comprising an amino acid sequence having at least 90% identity to an amino acid sequence selected from SEQ ID NOs: 1476, 1679, 1685, 1584, 1478, 1707, or 1708.

[0008] In some embodiments, the antibody, or antigen binding fragment thereof, comprises a light chain comprising an amino acid sequence having at least 90% identity to an amino acid sequence of SEQ ID NO: 1751; and a heavy chain comprising an amino acid sequence having at least 90% identity to an amino acid sequence selected of SEQ ID NO: 1752.

[0009] In some embodiments, the antibody, or antigen binding fragment thereof, comprises a light chain comprising an amino acid sequence of SEQ ID NO: 1751; and a heavy chain comprising an amino acid sequence of SEQ ID NO: 1752.

[0010] In some embodiments, a PD-1 agonist comprising four polypeptide chains is provided. In
[0011] some embodiments, the PD-1 agonist comprising four polypeptide chains, comprises:
[0012] Chain 1: N terminus (nt)-VH1-CH1-CH2-CH3-Linker A-scFv[VL2-Linker B-VH2]-C terminus (ct);
[0013] Chain 2: nt-VH1-CH1-CH2-CH3-Linker A-scFv[VL2-Linker B-VH2]-ct;
[0014] Chain 3: nt-VL1-CK-ct; and
[0015] Chain 4: nt-VL1-CK-ct;
[0016] wherein:
   [0017] VH1 comprises the sequence of SEQ ID NO: 1476;
   [0018] CH1-CH2-CH3 comprises the sequence of SEQ ID NO: 44;
   [0019] Linker A comprises the sequence of SEQ ID NO: 30;
   [0020] VL2 comprises the sequence of SEQ ID NO: 1445;
   [0021] Linker B comprises the sequence of SEQ ID NO: 22;
   [0022] VH2 comprises the sequence of SEQ ID NO: 1367;
[0023] VL1 comprises the sequence of SEQ ID NO: 1359; and
[0024] CK comprises the sequence of SEQ ID NO: 45.

[0025] In some embodiments, pharmaceutical compositions comprising antibodies provided herein, are provided.

[0026] In some embodiments, methods of treating inflammatory bowel disease are provided. In some embodiments, methods of treating auto-immune hepatitis, primary sclerosing cholangitis, Type 1 diabetes, graft-versus-host disease (GVHD), or an autoimmune disorder, are provided.

[0027] In some embodiments, methods of producing antibodies provided herein, are provided.

### BRIEF DESCRIPTION OF THE DRAWINGS

[0028] FIG. 1 depicts a bi-specific therapeutic compund in a tandem scFv-Fc format containing a targeting scFv domain and an effector domain consisting of either an scFv or a sequence corresponding to the endogenous ligand. The depiction is an example of a non-limiting embodiment of the therapeutic compounds provided herein.

[0029] FIG. 2 depicts a T cell bound to therapeutic componds disclosed herein. In state 1 the effector domain of a bi-specific binds inhibitory receptors of T cells while in systemic circulation, with neither agonism or antagonism of the receptor occurring. In state 2, the targeting domain of bi-specific binds to target organ leading to bi-specific multimerization on the target organ surface. During T cell recognition of target organ, multimerized effector domains bind, cluster and signal through T cell inhibitory molecules. The depiction is an example of a non-limiting illustration of how a therapeutic compound provided herein could function.

[0030] FIG. 3A depicts a non-limiting illustration of the therapeutic compounds provided herein.

[0031] FIG. 3B depicts a non-limiting illustration of the therapeutic compounds provided herein.

[0032] FIG. 4 depicts a non-limiting illustration of the therapeutic compounds provided herein.

[0033] FIG. 5 depicts a non-limiting illustration of the therapeutic compounds provided herein.

[0034] FIG. 6 depicts a non-limiting illustration of the therapeutic compounds provided herein.

[0035] FIG. 7 depicts a non-limiting illustration of the therapeutic compounds provided herein.

[0036] FIG. 8 depicts a non-limiting illustration of the therapeutic compounds provided herein.

[0037] FIG. 9 depicts a non-limiting illustration of the therapeutic compounds provided herein.

[0038] FIG. 10 depicts a non-limiting illustration of the therapeutic compounds provided herein.

[0039] FIG. 11 depicts a non-limiting illustration of the therapeutic compounds provided herein.

[0040] FIG. 12 depicts a non-limiting illustration of the therapeutic compounds provided herein.

[0041] FIG. 13 depicts a non-limiting illustration of the therapeutic compounds provided herein.

[0042] FIG. 14 depicts a non-limiting illustration of the therapeutic compounds provided herein.

[0043] FIG. 15 depicts a non-limiting illustration of the therapeutic compounds provided herein.

[0044] FIG. 16 depicts a non-limiting illustration of the therapeutic compounds provided herein.

[0045] FIG. 17 depicts a non-limiting illustration of the therapeutic compounds provided herein.

[0046] FIG. 18 depicts a non-limiting illustration of the therapeutic compounds provided herein.

[0047] FIG. 19 depicts a non-limiting illustration of the therapeutic compounds provided herein.

### DETAILED DESCRIPTION

[0048] This application incorporates by reference each of the following in its entirety: U.S. Provisional Application No. 63/117,914, filed Nov. 24, 2020, U.S. Provisional Application No. 63/117,918 filed Nov. 24, 2020, U.S. Provisional Application No. 63/115,243 filed Nov. 18, 2020, U.S. Provisional Application No. 63/115,235 filed Nov. 18, 2020, PCT Application No. PCT/US2020/046920 filed Aug. 19, 2020, U.S. Non-Provisional application Ser. No. 16/997,238 filed Aug. 19, 2020, PCT Application No. PCT/US2020/033707 filed May 20, 2020, and U.S. Provisional Application No. 62/850,172, filed May 20, 2019, U.S. application Ser. No. 15/922,592 filed Mar. 15, 2018 and PCT Application No. PCT/US2018/022675, filed Mar. 15, 2018. This application also incorporate by reference, each of the following in their entirety: U.S. Provisional Application No. 62/721,644, filed Aug. 23, 2018, U.S. provisional Application No. 62/675,972 filed May 24, 2018, U.S. provisional Application No. 62/595,357 filed Dec. 6, 2017, U.S. Provisional Application No. 62/595,348, filed Dec. 6, 2017, U.S. Non-Provisional application Ser. No. 16/109,875, filed Aug. 23, 2018, U.S. Non-Provisional application Ser. No. 16/109,897, filed Aug. 23, 2018, U.S. Non-Provisional application Ser. No. 15/988,311, filed May 24, 2018, PCT Application No. PCT/US2018/034334, filed May 24, 2018, and, PCT/US2018/062780, filed Nov. 28, 2018, each of which is hereby incorporated by reference in their entirety.

[0049] As used herein and in the appended claims, the singular forms “a”, “an” and “the” include plural reference unless the context clearly dictates otherwise.

[0050] As used herein, the term “about” means that the numerical value is approximate and small variations would not significantly affect the practice of the disclosed embodiments. Where a numerical limitation is used, unless indicated otherwise by the context, “about” means the numerical value can vary by +5% and remain within the scope of the disclosed embodiments. Thus, about 100 means 95 to 105.

[0051] As used herein, the term “animal” includes, but is not limited to, humans and non-human vertebrates such as wild, domestic, and farm animals. As used herein, the term “mammal” means a rodent (i.e., a mouse, a rat, or a guinea pig), a monkey, a cat, a dog, a cow, a horse, a pig, or a human. In some embodiments, the mammal is a human.

[0052] As used herein, the term “contacting” means bringing together of two elements in an in vitro system or an in vivo system. For example, “contacting” a therapeutic compound with an individual or patient or cell includes the administration of the compound to an individual or patient, such as a human, as well as, for example, introducing a compound into a sample containing a cellular or purified preparation containing target.

[0053] As used herein, the terms “comprising” (and any form of comprising, such as “comprise”, “comprises”, and “comprised”), “having” (and any form of having, such as “have” and “has”), “including” (and any form of including, such as “includes” and “include”), or “containing” (and any form of containing, such as “contains” and “contain”), are inclusive or open-ended and do not exclude additional, unrecited elements or method steps. Any composition or method that recites the term “comprising” should also be understood to also describe such compositions as consisting, consisting of, or consisting essentially of the recited components or elements.

[0054] As used herein, the term “fused” or “linked” when used in reference to a protein having different domains or heterologous sequences means that the protein domains are part of the same peptide chain that are connected to one another with either peptide bonds or other covalent bonding. The domains or section can be linked or fused directly to one another or another domain or peptide sequence can be between the two domains or sequences and such sequences would still be considered to be fused or linked to one another. In some embodiments, the various domains or proteins provided for herein are linked or fused directly to one another or a linker sequence, such as the glycine/serine sequences described herein to link the two domains together. Two peptide sequences are linked directly if they are directly connected to one another or indirectly if there is a linker or other structure that links the two regions. A linker can be directly linked to two different peptide sequences or domains.

[0055] As used herein, the term “individual,” “subject,” or “patient,” used interchangeably, means any animal, including mammals, such as mice, rats, other rodents, rabbits, dogs, cats, swine, cattle, sheep, horses, or primates, such as humans.

[0056] As used herein, the term “inhibit” refers to a result, symptom, or activity being reduced as compared to the activity or result in the absence of the compound that is inhibiting the result, symptom, or activity. In some embodiments, the result, symptom, or activity, is inhibited by about, or, at least, 10%, 20%, 30%, 40%, 50%, 60%, 70%, 80%, 90%, 95%, or 99%. An result, symptom, or activity can also be inhibited if it is completely elimination or extinguished.

[0057] As used herein, the phrase “in need thereof” means that the subject has been identified as having a need for the particular method or treatment. In some embodiments, the identification can be by any means of diagnosis. In any of the methods and treatments described herein, the subject can be in need thereof. In some embodiments, the subject is in an environment or will be traveling to an environment in which a particular disease, disorder, or condition is prevalent. In some embodiments, the subject is at risk of developing a particular disease or disorder that a treatment is intended to treat and/or prevent. Those “in need of treatment” include those patients that may benefit form treatment with the methods of the inventions, e.g. a patient suffering from or at risk of developing an autoimmune disorder or diabetes.

[0058] As used herein, the phrase “integer from X to Y” means any integer that includes the endpoints. For example, the phrase “integer from 1 to 5” means 1, 2, 3, 4, or 5.

[0059] In some embodiments, therapeutic compounds are provided herein. In some embodiments, the therapeutic compound is a protein or a polypeptide, that has multiple peptide chains that interact with one another. The polypeptides can interact with one another through non-covalent interactions or covalent interactions, such as through disulfide bonds or other covalent bonds. Therefore, if an embodiment refers to a therapeutic compound it can also be said to refer to a protein or polypeptide as provided for herein and vice versa as the context dictates.

[0060] As used herein, the phrase “ophthalmically acceptable” means having no persistent detrimental effect on the treated eye or the functioning thereof, or on the general health of the subject being treated. However, it will be recognized that transient effects such as minor irritation or a “stinging” sensation are common with topical ophthalmic administration of drugs and the existence of such transient effects is not inconsistent with the composition, formulation, or ingredient (e.g., excipient) in question being “ophthalmically acceptable” as herein defined. In some embodiments, the pharmaceutical compositions can be ophthalmically acceptable or suitable for ophthalmic administration.

[0061] “Specific binding” or “specifically binds to” or is “specific for” a particular antigen, target, or an epitope means binding that is measurably different from a non-specific interaction. Specific binding can be measured, for example, by determining binding of a molecule compared to binding of a control molecule, which generally is a molecule of similar structure that does not have binding activity. For example, specific binding can be determined by competition with a control molecule that is similar to the target.

[0062] Specific binding for a particular antigen, target, or an epitope can be exhibited, for example, by an antibody having a K_{D} for an antigen or epitope of at least about 10^{-4M}, at least about 10^{-5M}, at least about 10^{-6M}, at least about 10^{-7M}, at least about 10^{-8M}, at least about 10^{-9M}, alternatively at least about 10⁻¹⁰ M, at least about 10^{-11M}, at least about 10^{-12M}, or greater, where K_{D} refers to a dissociation rate of a particular antibody-target interaction. Typically, an antibody that specifically binds an antigen or target will have a K_{D} that is, or at least, 2-, 4-, 5-, 10-, 20-, 50-, 100-, 500-, 1000-, 5,000-, 10,000-, or more times greater for a control molecule relative to the antigen or epitope.

[0063] In some embodiments, specific binding for a particular antigen, target, or an epitope can be exhibited, for example, by an antibody having a K_{A} or Kₐ for a target, antigen, or epitope of at least 2-, 4-, 5-, 20-, 50-, 100-, 500-, 1000-, 5,000-, 10,000- or more times greater for the target, antigen, or epitope relative to a control, where K_{A} or Kₐ refers to an association rate of a particular antibody-antigen interaction.

[0064] As provided herein, the therapeutic compounds and compositions can be used in methods of treatment as provided herein. As used herein, the terms “treat.” “treated,” or “treating” mean both therapeutic treatment and prophylactic measures wherein the object is to slow down (lessen) an undesired physiological condition, disorder or disease, or obtain beneficial or desired clinical results. For purposes of these embodiments, beneficial or desired clinical results include, but are not limited to, alleviation of symptoms; diminishment of extent of condition, disorder or disease; stabilized (i.e., not worsening) state of condition, disorder or disease; delay in onset or slowing of condition, disorder or disease progression; amelioration of the condition, disorder or disease state or remission (whether partial or total), whether detectable or undetectable; an amelioration of at least one measurable physical parameter, not necessarily discernible by the patient; or enhancement or improvement of condition, disorder or disease. Treatment includes eliciting a clinically significant response without excessive levels of side effects. Treatment also includes prolonging survival as compared to expected survival if not receiving treatment. Thus, “treatment of an auto-immune disease/disorder” means an activity that alleviates or ameliorates any of the primary phenomena or secondary symptoms associated with the auto-immune disease/disorder or other condition described herein. Methods of the treatment of various diseases or conditions are provided herein. The therapeutic treatment can also be administered prophylactically to preventing or reduce the disease or condition before the onset.

### PD-1 Agonists

[0065] Provided herein are therapeutic compounds, e.g., therapeutic protein molecules, e.g., fusion proteins, including a targeting moiety and an effector binding/modulating moiety, typically as separate domains. Also provided are methods of using and making the therapeutic compounds. The targeting moiety serves to localize the therapeutic compound, and thus the effector binding/modulating moiety, to a site at which immune-privilege is desired. As used herein, “immune privilege” means lack of, or suppression of an inflammatory response. As a non-limiting example, immune privilege includes situations where a tissue or site in the body is able to tolerate the introduction of antigens without eliciting an inflammatory immune response (Forester J. V., Lambe H. Xu, Comall R. Immune Privilege or privileged immunity? Mucosal Immunology, 1, 372-381 (2008)).

[0066] The effector binding/modulating moiety comprises one or more of: (a) an immune cell inhibitory molecule binding/modulating moiety (an ICIM binding/modulating moiety): (b) an immunosuppressive immune cell binding/modulating moiety (an IIC binding/modulating moiety); (c) a soluble molecule binding/modulating moiety (a SM binding/modulating moiety) or (d) a molecule that blocks or inhibits immune cell stimulatory molecule binding/modulating moiety (referred to herein as an ICSM binding/modulating moiety). In some embodiments, the ICSM inhibits immune activation by, for example, blocking the interaction between a costimulatory molecule and its counter structure. In some embodiments, a therapeutic compound comprises: (a) and (b); (a) and (c); (a) and (d); (b) and (c); (b) and (d); (c) and (d); or (a), (b), (c), and (d).

[0067] The present disclosure provides, for example, molecules that can act as PD-1 agonists. Without being bound to any particular theory, agonism of PD-1 inhibits T cell activation/signaling and can be accomplished by different mechanisms. For example cross-linking of bead-bound functional PD-1 agonists can lead to agonism. Functional PD-1 agonists have been described (Akkaya. Ph.D. Thesis: Modulation of the PD-1 pathway by inhibitory antibody super agonists. Christ Church College, Oxford, U K, 2012), which is hereby incorporated by reference. Crosslinking of PD-1 with two mAbs that bind non-overlapping epitopes induces PD-1 signaling (Davis, US 2011/0171220), which is hereby incorporated by reference. Another example is illustrated through the use of a goat anti-PD-1 antiserum (e.g. AF1086, R&D Systems), which acts as an agonist when soluble (Said et al., 2010, Nat Med. 2010 April; 16(4):452-9) which is hereby incorporated by reference. Non-limiting examples of PD-1 agonists that can be used in the present embodiments include, but are not limited to, UCB clone 19 or clone 10, PD1AB-1, PD1AB-2, PD1AB-3, PD1AB-4 and PD1AB-5, PD1AB-6 (Anaptys/Celgene), PD1-17, PD1-28, PD1-33 and PD1-35 (Collins et al, US 2008/0311117 A1 Antibodies against PD-1 and uses therefor, which is incorporated by reference), or can be a bi-specific, monovalent anti-PD-1/anti-CD3 (Ono), and the like. In some embodiments, the PD-1 agonist antibodies can be antibodies that block binding of PD-L1 to PD-1. In some embodiments, the PD-1 agonist antibodies can be antibodies that do not block binding of PD-L1 to PD-1.

[0068] PD-1 agonism can be measured by any method, such as the methods described in the examples. For example, cells can be constructed that express, including stably express, constructs that include a human PD-1 polypeptide fused to a P-galactosidase “Enzyme donor” and 2) a SHP-2 polypeptide fused to a P-galactosidase “Enzyme acceptor.” Without being bound by any theory, when PD-1 is engaged, SHP-2 is recruited to PD-1. The enzyme acceptor and enzyme donor form a fully active b-galactosidase enzyme that can be assayed. Although, the assay does not directly show PD-1 agonism, but shows activation of PD-1 signaling. PD-1 agonism can also be measured by measuring inhibition of T cell activation because, without being bound to any theory, PD-1 agonism inhibits anti-CD3-induced T cell activation. For example, PD-1 agonism can be measured by preactivating T cells with PHA (for human T cells) or ConA (for mouse T cells) so that they express PD-1. The cells can then be reactivated with anti-CD3 in the presence of anti-PD-1 (or PD-L1) for the PD-1 agonism assay. T cells that receive a PD-1 agonist signal in the presence of anti-CD3 will show decreased activation, relative to anti-CD3 stimulation alone. Activation can be readout by proliferation or cytokine production (IL-2, IFNg, IL-17) or other markers, such as CD69 activation marker. Thus, PD-1 agonism can be measured by either cytokine production or cell proliferation. Other methods can also be used to measure PD-1 agonism.

[0069] PD-1 is an Ig superfamily member expressed on activated T cells and other immune cells. The natural ligands for PD-1 appear to be PD-L1 and PD-L2. Without being bound to any particular theory, when PD-L1 or PD-L2 bind to PD-1 on an activated T cell, an inhibitory signaling cascade is initiated, resulting in attenuation of the activated T effector cell function. Thus, blocking the interaction between PD-1 on a T cell, and PD-L1/2 on another cell (for example, a tumor cell) with a PD-1 antagonist is known as checkpoint inhibition, and releases the T cells from inhibition. In contrast, PD-1 agonist antibodies can bind to PD-1 and send an inhibitory signal and attenuate the function of a T cell. Thus, PD-1 agonist antibodies can be incorporated into various embodiments described herein as an effector molecule binding/modulating moiety (sometimes also referred to herein as an effector molecule), which can accomplish localized tissue-specific immunomodulation when paired with a targeting moiety.

[0070] The effector molecule binding/modulating moiety can provide an immunosuppressive signal or environment in a variety of ways. In some embodiments, the effector binding/modulating moiety comprises an ICIM binding/modulating moiety that directly binds and (under the appropriate conditions as described herein) activates an inhibitory receptor expressed by immune cells responsible for driving disease pathology. In another embodiment the effector binding/modulating moiety comprises and IIC binding/modulating moiety and binds and accumulates immunosuppressive immune cells. In some embodiments, the accumulated immune suppressive cells promote immune privilege. In another embodiment the effector binding/modulating moiety comprises an SM binding/modulating moiety which manipulates the surrounding microenvironment to make it less permissible for the function of immune cells, e.g., immune cells driving disease pathology. In some embodiments, the SM binding/modulating moiety depletes an entity that promotes immune attack or activation. In some embodiments the effector binding/modulating moiety comprises an ICSM binding/modulating moiety that binds a member of a pair of stimulatory molecules, e.g., costimulatory molecules, and inhibits the interaction between the costimulatory molecule and the costimulatory molecule counter structure, such as, but not limited to, OX40 or CD30 or CD40 and OX40L, or CD30L or CD40L and inhibits the immune stimulation of a cell, such as, but not limited to, a T cell, B cell, NK cell, or other immune cell comprising a member of the pair.

[0071] The targeting moiety and effector binding/modulating moiety are physically tethered, covalently or non-covalently, directly or through a linker entity, to one another, e.g., as a member of the same protein molecule in a therapeutic protein molecule. In some embodiments, the targeting and effector moieties are provided in a therapeutic protein molecule, e.g., a fusion protein, typically as separate domains. In some embodiments, the targeting moiety, the effector binding/modulating moiety, or both each comprises a single domain antibody molecule, e.g., a camelid antibody VHH molecule or human soluble VH domain. It may also contain a single-chain fragment variable (scFv) or a Fab domain. In some embodiments, the therapeutic protein molecule, or a nucleic acid, e.g., an mRNA or DNA, encoding the therapeutic protein molecule, can be administered to a subject. In some embodiments, the targeting and effector molecule binding/modulating moieties are linked to a third entity, e.g., a carrier, e.g., a polymeric carrier, a dendrimer, or a particle, e.g., a nanoparticle. The therapeutic compounds can be used to down regulate an immune response at or in a tissue at a selected target or site while having no or substantially less immunosuppressive function systemically. The target or site can comprise donor tissue or autologous tissue.

[0072] Provided herein are methods of providing site-specific immune privilege for a transplanted donor tissue, e.g., an allograft tissue, e.g., a tissue described herein, e.g., an allograft liver, an allograft kidney, an allograft heart, an allograft pancreas, an allograft thymus or thymic tissue, allograft skin, or an allograft lung, with therapeutic compounds disclosed herein. In embodiments the treatment minimizes rejection of, minimizes immune effector cell mediated damage to, prolongs acceptance of, or prolongs the functional life of, donor transplant tissue.

[0073] Also provided herein are methods of inhibiting graft versus host disease (GVHD) by minimizing the ability of donor immune cells, e.g., donor T cells, to mediate immune attack of recipient tissue, with therapeutic compounds disclosed herein.

[0074] Also provided herein are methods of treating, e.g., therapeutically treating or prophylactically treating (or preventing), an auto-immune disorder or autoimmune response in a subject by administration of a therapeutic compound disclosed herein, e.g., to provide site or tissue specific modulation of the immune system. In some embodiments, the method provides tolerance to, minimization of the rejection of, minimization of immune effector cell mediated damage to, or prolonging a function of, subject tissue. In some embodiments, the therapeutic compound includes a targeting moiety that targets, e.g., specifically targets, the tissue under, or at risk for, autoimmune attack. Non-limiting exemplary tissues include, but are not limited to, the pancreas, myelin, salivary glands, synoviocytes, and myocytes.

[0075] In some embodiments, administration of the therapeutic compound begins after the disorder is apparent. In some embodiments, administration of the therapeutic compound, begins prior to onset, or full onset, of the disorder. In some embodiments, administration of the therapeutic compound, begins prior to onset, or full onset, of the disorder, e.g., in a subject having the disorder, a high-risk subject, a subject having a biomarker for risk or presence of the disorder, a subject having a family history of the disorder, or other indicator of risk of, or asymptomatic presence of, the disorder. For example, in some embodiments, a subject having islet cell damage but which is not yet diabetic, is treated.

[0076] While not wishing to be bound by theory, it is believed that the targeting moiety functions to bind and accumulate the therapeutic compound to a target selectively expressed at the anatomical site where immune privilege is desired. In some embodiments, e.g., in the context of donor tissue transplantation, the target moiety binds to a target, e.g., an allelic product, present in the donor tissue but not the recipient. For treatment of autoimmune disorders, the targeting moiety binds a target preferentially expressed at the anatomical site where immune privilege is desired, e.g., in the pancreas. For treatment of GVHD, the targeting moiety targets the host tissue, and protects the host against attack from transplanted immune effector cells derived from transplanted tissue.

[0077] Again, while not wishing to be bound by theory it is believed that the effector binding/modulating moiety serves to deliver an immunosuppressive signal or otherwise create an immune privileged environment.

[0078] Effector, as that term is used herein, refers to an entity, e.g., a cell or molecule, e.g., a soluble or cell surface molecule, which mediates an immune response.

[0079] Effector ligand binding molecule, as used herein, refers to a polypeptide that has sufficient sequence from a naturally occurring counter-ligand of an effector, that it can bind the effector with sufficient specificity that it can serve as an effector binding/modulating molecule. In some embodiments, it binds to effector with at least 10, 20, 30, 40, 50, 60, 70, 80, 90, or 95% of the affinity of the naturally occurring counter-ligand. In some embodiments, it has at least 60, 70, 80, 90, 95, 99, or 100% sequence identity, or substantial sequence identity, with a naturally occurring counter-ligand for the effector.

[0080] Effector specific binding polypeptide, as used herein, refers to a polypeptide that can bind with sufficient specificity that it can serve as an effector binding/modulating moiety. In some embodiments, a specific binding polypeptide comprises an effector ligand binding molecule.

[0081] Unless otherwise defined, all technical and scientific terms used herein have the same meaning as commonly understood by one of ordinary skill in the art to which these embodiments belong. Although methods and materials similar or equivalent to those described herein can be used in the practice or testing of the present embodiments, suitable methods and materials are described below. All publications, patent applications, patents, and other references mentioned herein are incorporated by reference in their entirety. In addition, the materials, methods, and examples are illustrative only and not intended to be limiting. Headings, sub-headings or numbered or lettered elements, e.g., (a), (b), (i) etc., are presented merely for ease of reading. The use of headings or numbered or lettered elements in this document does not require the steps or elements be performed in alphabetical order or that the steps or elements are necessarily discrete from one another. Other features, objects, and advantages of the embodiments will be apparent from the description and drawings, and from the claims.

### Additional Definitions

[0082] Unless defined otherwise, all technical and scientific terms used herein have the same meaning as commonly understood by one of ordinary skill in the art to which the embodiments pertains. In describing and claiming the present embodiments, the following terminology and terminology otherwise referenced throughout the present application will be used according to how it is defined, where a definition is provided.

[0083] It is also to be understood that the terminology used herein is for the purpose of describing particular embodiments only, and is not intended to be limiting.

[0084] Antibody molecule, as that term is used herein, refers to a polypeptide, e.g., an immunoglobulin chain or fragment thereof, comprising at least one functional immunoglobulin variable domain sequence. An antibody molecule encompasses antibodies (e.g., full-length antibodies) and antibody fragments. In some embodiments, an antibody molecule comprises an antigen binding or functional fragment of a full length antibody, or a full length immunoglobulin chain. For example, a full-length antibody is an immunoglobulin (Ig) molecule (e.g., an IgG antibody) that is naturally occurring or formed by normal immunoglobulin gene fragment recombinatorial processes). In embodiments, an antibody molecule refers to an immunologically active, antigen-binding portion of an immunoglobulin molecule, such as an antibody fragment. An antibody fragment, e.g., functional fragment, comprises a portion of an antibody, e.g., Fab, Fab′, F(ab′)2, F(ab)2, variable fragment (Fv), domain antibody (dAb), or single chain variable fragment (scFv). A functional antibody fragment binds to the same antigen as that recognized by the intact (e.g., full-length) antibody. The terms “antibody fragment” or “functional fragment” also include isolated fragments consisting of the variable regions, such as the “Fv” fragments consisting of the variable regions of the heavy and light chains or recombinant single chain polypeptide molecules in which light and heavy variable regions are connected by a peptide linker (“scFv proteins”). In some embodiments, an antibody fragment does not include portions of antibodies without antigen binding activity, such as Fc fragments or single amino acid residues. Exemplary antibody molecules include full length antibodies and antibody fragments, e.g., dAb (domain antibody), single chain, Fab, Fab′, and F(ab′)2 fragments, and single chain variable fragments (scFvs).

[0085] Immunoglobulin chains exhibit the same general structure of relatively conserved framework regions (FR) joined by three hypervariable regions, also called complementarity determining regions or CDRs. The CDRs from the two chains of each pair are aligned by the framework regions, enabling binding to a specific epitope. From N-terminus to C-terminus, both light and heavy chains comprise the domains FR1, CDR1, FR2, CDR2, FR3, CDR3 and FR4. The assignment of amino acids to each domain is in accordance with the definitions of Kabat Sequences of Proteins of Immunological Interest (National Institutes of Health, Bethesda, Md. (1987 and 1991)), or Chothia & Lesk J. Mol. Biol. 196:901-917 (1987); Chothia et al. Nature 342:878-883 (1989). In some embodiments, the antibodies provided herein comprise the same FRs and different CDRs. In some embodiments, the antibodies provided herein comprise the same CDRs and different FRs. In some embodiments, mutations in the FR are in the heavy chain. In some embodiments, mutations in the FR are in the FR1 of the heavy chain. In some embodiments, mutations in the FR are in the FR2 of the heavy chain. In some embodiments, mutations in the FR are in the FR3 of the heavy chain. In some embodiments, mutations in the FR are in the FR4 of the heavy chain. In some embodiments, mutations in the FR are in the light chain. In some embodiments, mutations in the FR are in the FR1 of the light chain. In some embodiments, mutations in the FR are in the FR2 of the light chain. In some embodiments, mutations in the FR are in the FR3 of the light chain. In some embodiments, mutations in the FR are in the FR4 of the light chain. In some embodiments, mutations in the FR are in the heavy and light chains. In some embodiments, mutations in the FR are in any one or more of the FRs of the heavy and light chains.

[0086] The term “antibody molecule” also encompasses whole or antigen binding fragments of domain, or single domain, antibodies, which can also be referred to as “sdAb” or “VHH.” Domain antibodies comprise either VH or VL that can act as stand-alone, antibody fragments. Additionally, domain antibodies include heavy-chain-only antibodies (HCAbs). Domain antibodies also include a CH2 domain of an IgG as the base scaffold into which CDR loops are grafted. It can also be generally defined as a polypeptide or protein comprising an amino acid sequence that is comprised of four framework regions interrupted by three complementarity determining regions. This is represented as FR1-CDR1-FR2-CDR2-FR3-CDR3-FR4. sdAbs can be produced in camelids such as llamas, but can also be synthetically generated using techniques that are well known in the art. The numbering of the amino acid residues of a sdAb or polypeptide is according to the general numbering for VH domains given by Kabat et al. (“Sequence of proteins of immunological interest,” US Public Health Services, NIH Bethesda, MD, Publication No. 91, which is hereby incorporated by reference). According to this numbering, FR1 of a sdAb comprises the amino acid residues at positions 1-30, CDR1 of a sdAb comprises the amino acid residues at positions 31-36, FR2 of a sdAb comprises the amino acids at positions 36-49, CDR2 of a sdAb comprises the amino acid residues at positions 50-65, FR3 of a sdAb comprises the amino acid residues at positions 66-94, CDR3 of a sdAb comprises the amino acid residues at positions 95-102, and FR4 of a sdAb comprises the amino acid residues at positions 103-113. Domain antibodies are also described in WO2004041862 and WO2016065323, each of which is hereby incorporated by reference. The domain antibodies can be a targeting moiety as described herein.

[0087] Antibody molecules can be monospecific (e.g., monovalent or bivalent), bispecific (e.g., bivalent, trivalent, tetravalent, pentavalent, or hexavalent), trispecific (e.g., trivalent, tetravalent, pentavalent, hexavalent), or with higher orders of specificity (e.g., tetraspecific) and/or higher orders of valency beyond hexavalency. An antibody molecule can comprise a functional fragment of a light chain variable region and a functional fragment of a heavy chain variable region, or heavy and light chains may be fused together into a single polypeptide.

[0088] Examples of formats for multispecific therapeutic compounds, e.g., bispecific antibody molecules are shown in the following non-limiting examples. Although illustrated with antibody molecules, they can be used as platforms for therapeutic molecules that include other non-antibody moieties as specific binding or effector moieties. In some embodiments, these non-limiting examples are based upon either a symmetrical or asymmetrical Fc formats.

[0089] For example, the figures illustrate non-limiting and varied symmetric homodimer approach. In some embodiments, the dimerization interface centers around human IgG1 CH2-CH3 domains, which dimerize via a contact interface spanning both CH2/CH2 and CH3/CH3. The resulting bispecific antibodies shown have a total valence comprised of four binding units with two identical binding units at the N-terminus on each side of the dimer and two identical units at the C-terminus on each side of the dimer. In each case the binding units at the N-terminus of the homo-dimer are different from those at the C-terminus of the homo-dimer. Using this type of bivalency for both an inhibitory T cell receptor at either terminus of the molecule and bivalency for a tissue tethering antigen can be achieved at either end of the molecule.

[0090] For example, in FIG. 3A, a non-limiting embodiment is illustrated. The N-terminus of the homodimer contains two identical Fab domains comprised of two identical light chains, which are separate polypeptides, interfaced with the n-terminal VH-CH1 domains of each heavy chain via the VH/VL interaction and Ckappa or Clambda interaction with CH1. The native disulfide bond between the Ckappa or Clambda with CH1 is present providing a covalent anchor between the light and heavy chains. At the c-terminus of this design are two identical scFv units where by (in this example) the c-terminus of the CH3 domain of the Fc, is followed by a flexible, hydrophilic linker typically comprised of (but not limited to) serine, glycine, alanine, and/or threonine residues, which is followed by the VH domain of each scFv unit, which is followed by a glycine/serine rich linker, followed by a VL domain. These tandem VH and VL domains associate to form a single chain fragment variable (scFv) appended at the c-terminus of the Fc. Two such units exist at the c-terminus of this molecule owing to the homodimeric nature centered at the Fc. The domain order of scFvs may be configured to be from N to C terminus either VH-Linker-VL or VL-Linker-VH.

[0091] A non-limiting example of a molecule that has different binding regions on the different ends includes a molecule that comprises a PD-1 agonist at one end and an antibody that provides target specificity, particularly, an anti-MAdCAM-1 antibody at the other end. This can be illustrated as shown, for example, in FIG. 3B, which illustrates the molecules in different orientations. For example, FIG. 1 depicts a bi-specific therapeutic compund in a tandem scFv-Fc format containing a targeting scFv domain and an effector domain consisting of either an scFv or a sequence corresponding to the endogenous ligand. FIG. 2 depicts a T cell bound to therapeutic componds disclosed herein. In state 1 the effector domain of a bi-specific binds inhibitory receptors of T cells while in systemic circulation, with neither agonism or antagonism of the receptor occurring. In state 2, the targeting domain of bi-specific binds to target organ leading to bi-specific multimerization on the target organ surface. During T cell recognition of target organ, multimerized effector domains bind, cluster and signal through T cell inhibitory molecules.

[0092] In some embodiments, the MAdCAM antibody is a blocking or non-blocking antibody as described elsewhere herein. Without being bound to any theory, MAdCAM has been shown to interact with the headpiece of the integrin α4β7 expressed on lymphocytes via multiple residues within its two Ig superfamily I-set domains and the atomic level structural basis for that interaction has been described (Viney J L et al. (1996). J Immunol. 157, 2488-2497; Yu Y et al (2013). J Biol Chem. 288, 6284-6294; Yu Y et al (2012). J Cell Biol. 196, 131-146, each of which is incorporated by reference in its entirety). It has been shown in great structural, mechanistic and functional detail in both human (Chen J et al (2003). Nat Struct Biol. 10, 995-1001; de Chateau M et al (2001). Biochemistry. 40, 13972-13979) and mouse (Day E S et al (2002). Cell Commun Adhes. 9, 205-219; Hoshino H et al (2011). J Histochem Cytochem. 59, 572-583) molecular systems that any interaction of MAdCAM with α4β7 is dependent on three dication binding sites present in the integrin beta 7 subunit I-like domain and that these metal binding sites can coordinate with Ca2+, Mn2+, and Mg2+. Using cell adhesion assays, flow cytometry, and/or flow chamber assays in the presence of high levels of Ca2+ with or without Mg2+ or Mn2+, the MAdCAM/α4β7 interaction is shown to be of a lower functional affinity and permits rolling adhesion of lymphocytes, whereas in low Ca2+ but higher Mg2+ or Mn2+ which activates the integrin, the MAdCAM/α4β7 interaction is of a higher functional affinity and mediates firm lymphocyte adhesion (Chen J et al (2003). Nat Struct Biol. 10, 995-1001). A number of groups have shown that various cell:cell, cell:membrane prep, and/or cell:protein based adhesion/interaction assays can be utilized, with FACS, cell flow chamber based counts, or IHC based read-outs to monitor the impact of anti-MAdCAM or anti-α4β7 antibodies upon the interaction of MAdCAM with α4β7, allowing one to identify blocking or non-blocking antibodies (Nakache, M et al (1989). Nature. 337, 179-181; Streeter, P R et al (1988). Nature. 331. 41-46; Yang Y et al (1995). Scand J Immunol. 42. 235-247; Leung E et al (2004). Immunol Cell Biol. 82. 400-409; Pullen N et al (2009). B J Pharmacol. 157. 281-293; Soler D et al (2009). J Pharmacol Exp Ther. 330. 864-875; Qi J et al (2012). J Biol Chem. 287. 15749-15759).

[0093] This has been exemplified in the mouse system setting with the identification of anti-mouse MAdCAM antibodies such as MECA-89 (non-blocking) and MECA-367 (blocking)) Nakache, M et al (1989). Nature. 337, 179-181; Streeter, P R et al (1988). Nature. 331. 41-46; Yang Y et al (1995). Scand J Immunol. 42. 235-247). In a human system, antibodies have been identified that block the interaction of human MAdCAM with human α4β7 such as anti-human MAdCAM PF-00547659 (Pullen N et al (2009). B J Pharmacol. 157. 281-293) and anti-human α4β7 vedolizumab (Soler D et al (2009). J Pharmacol Exp Ther. 330. 864-875), as well as antibodies that do not block the interaction such as anti-human MAdCAM clone 17F5 (Soler D et al (2009). J Pharmacol Exp Ther. 330. 864-875), and anti-human α4β7 clone J19 (Qi J et al (2012). J Biol Chem. 287. 15749-15759). Thus, the antibody can either be blocking or non-blocking based upon the desired effect. In some embodiments, the antibody is a non-blocking MAdCAM antibody. In some embodiments, the antibody is a blocking MAdCAM antibody. One non-limiting example of demonstrating whether an antibody is blocking or non-blocking can be found throughout the examples, but any method can be used. Each of the references described herein are incorporated by reference in its entirety. In some embodiments, the PD-1 Agonist is replaced with an IL-2 mutein, such as, but not limited to, the ones described herein.

[0094] In another example, and as depicted in FIG. 4, the N-terminus of the homodimer contains two identical Fab domains comprised of two identical light chains, which are separate polypeptides, interfaced with the n-terminal VH-CH1 domains of each heavy chain via the VH/VL interaction and Ckappa or Clambda interaction with CH1. The native disulfide bond between the Ckappa or Clambda with CH1 is present providing a covalent anchor between the light and heavy chains. At the C-terminus of this design are two identical VH units (though non-antibody moieties could also be substituted here or at any of the four terminal attachment/fusion points) where by (in this example) the C-terminus of the CH3 domain of the Fc, is followed by a flexible, hydrophilic linker typically comprised of (but not limited to) serine, glycine, alanine, and/or threonine residues, which is followed by a soluble independent VH3 germline family based VH domain. Two such units exist at the C-terminus of this molecule owing to the homodimeric nature centered at the Fc.

[0095] In another non-limiting example, as depicted in FIG. 5, the N-terminus of the homodimer contains two identical Fab domains comprised of two identical light chains, which, unlike FIG. 3A and FIG. 4, are physically conjoined with the heavy chain at the N-terminus via a linker between the C-terminus of Ckappa or Clambda and the N-terminus of the VH. The linker may be 36-80 amino acids in length and comprised of serine, glycine, alanine and threonine residues. The physically conjoined N-terminal light chains interface with the n-terminal VH-CH1 domains of each heavy chain via the VH/VL interaction and Ckappa or Clambda interaction with CH1. The native disulfide bond between the Ckappa or Clambda with CH1 is present providing additional stability between the light and heavy chains. At the c-terminus of this design are two identical Fab units where by (in this example) the C-terminus of the CH3 domain of the Fc, is followed by a flexible, hydrophilic linker typically comprised of (but not limited to) serine, glycine, alanine, and/or threonine residues, which is followed by a CH1 domain, followed by a VH domain at the C-terminus. The light chain that is designed to pair with the C-terminal CH1/VH domains is expressed as a separate polypeptide, unlike the N-terminal light chain which is conjoined to the n-terminal VH/CH1 domains as described. The C-terminal light chains form an interface at between VH/VL and Ckappa or Clambda with CH1. The native disulfide anchors this light chain to the heavy chain. Again, any of the antibody moieties at any of the four attachment/fusion points can be substituted with a non-antibody moiety, e.g., an effector binding/modulating moiety that does not comprise an antibody molecule.

[0096] The bispecific antibodies can also be asymmetric as shown in the following non-limiting examples. Non-limiting example are also depicted in FIG. 6, FIG. 7, and FIG. 8, which illustrate an asymmetric/heterodimer approach. Again, in any of these formats, any of the antibody moieties at any of the four attachment/fusion points can be substituted with a non-antibody moiety, e.g., an effector binding/modulating moiety that does not comprise an antibody molecule. In some embodiments, the dimerization interface centers around the human IgG1 CH2-CH3 domains, which dimerize via a contact interface spanning both CH2/CH2 and CH3/CH3. However, in order to achieve heterodimerization instead of homodimerization of each heavy chain, mutations are introduced in each CH3 domain. The heterodimerizing mutations include T366W mutation (kabat) in one CH3 domain and T366S, L368A, and Y407V (kabat) mutations in the other CH3 domain. The heterodimerizing interface may be further stabilized with de novo disulfide bonds via mutation of native residues to cysteine residues such as S354 and Y349 on opposite sides of the CH3/CH3 interface. The resulting bispecific antibodies shown have a total valence comprised of four binding units. With this approach, the overall molecule can be designed to have bispecificity at just one terminus and monospecificity at the other terminus (trispecificity overall) or bispecificity at either terminus with an overall molecular specificity of 2 or 4. In the illustrative examples below, the C-terminus comprises two identical binding domains which could, for example, provide bivalent monospecificity for a tissue tethering target. At the N-terminus of all three of the illustrative examples, both binding domains comprise different recognition elements/paratopes and which could achieve recognition of two different epitopes on the same effector moiety target, or could recognize for examples a T cell inhibitory receptor and CD3. In some embodiments, the N-terminal binding moieties may be interchanged with other single polypeptide formats such as scFv, single chain Fab, tandem scFv, VH or VHH domain antibody configurations for example. Other types of recognition element may be used also, such as linear or cyclic peptides.

[0097] An example of an asymmetric molecule is depicted in FIG. 6. Referring to FIG. 6, the N-terminus of the molecule is comprised of a first light chain paired with a first heavy chain via VH/VL and Ckappa or Clambda/CH1 interactions and a covalent tether comprised of the native heavy/light chain disulfide bond. On the opposite side of this heterodimeric molecule at the N-terminus is a second light chain and a second heavy chain which are physically conjoined via a linker between the C-terminus of Ckappa or Clambda and the N-terminus of the VH. The linker may be 36-80 amino acids in length and comprised of serine, glycine, alanine and threonine residues. The physically conjoined N-terminal light chains interface with the N-terminal VH-CH1 domains of each heavy chain via the VH/VL interaction and Ckappa or Clambda interaction with CH1. The native disulfide bond between the Ckappa or Clambda with CH1 is present providing additional stability between the light and heavy chains. At the C-terminus of the molecule are two identical soluble VH3 germline family VH domains joined via an N-terminal glycine/serine/alanine/threonine based linker to the C-terminus of the CH3 domain of both heavy chain 1 and heavy chain 2.

[0098] In some embodiments, an asymmetric molecule can be as illustrated as depicted in FIG. 7. For example, the N-terminus of the molecule is comprised of two different VH3 germlined based soluble VH domains linked to the human IgG1 hinge region via a glycine/serine/alanine/threonine based linker. The VH domain connected to the first heavy chain is different to the VH domain connected to the second heavy chain. At the c-terminus of each heavy chain is an additional soluble VH3 germline based VH domain, which is identical on each of the two heavy chains. The heavy chain heterodimerizes via the previously described knobs into holes mutations present at the CH3 interface of the Fc module.

[0099] In some embodiments, an asymmetric molecule can be as illustrated in FIG. 8. This example is similar to the molecule shown in FIG. 7, except both N-terminal Fab units are configured in a way that light chain 1 and light chain 2 are physically conjoined with heavy chain 1 and heavy chain 2 via a linker between the c-terminus of Ckappa or Clambda and the N-terminus of each respective VH. The linker in each case may be 36-80 amino acids in length and comprised of serine, glycine, alanine and threonine residues. The physically conjoined N-terminal light chains interface with the N-terminal VH-CH1 domains of each heavy chain via the VH/VL interaction and Ckappa or Clambda interaction with CH1. The native disulfide bond between the Ckappa or Clambda with CH1 is present providing additional stability between the light and heavy chains.

[0100] Bi-specific molecules can also have a mixed format. This is illustrated, for example, in FIG. 9, FIG. 10, and FIG. 11.

[0101] For example, FIG. 9, illustrates a homodimer Fc based approach (see FIGS. 3, 4, and 5), combined with the moiety format selection of FIG. 7, whereby the total molecular valency is four, but specificity is restricted to two specificities. The N-terminus is comprised of two identical soluble VH3 germline based VH domains and the c-terminus is comprised of two identical soluble VH3 germlined based VH domains of different specificity to the N-terminal domains. Therefore, each specificity has a valence of two. Again, in this format, any of the antibody moieties at any of the four attachment/fusion points can be substituted with a non-antibody moiety, e.g., an effector binding/modulating moiety that does not comprise an antibody molecule.

[0102] FIG. 10 illustrates another example of a bispecific molecule having a mixed format. In this example, the molecule is comprised of four VH3 germline based soluble VH domains. The first two domains have the same specificity (for example an inhibitory receptor), the 3rd domain from the N-terminus may have specificity for a tissue antigen and the fourth domain from the N-terminus may have specificity for human serum albumin (HSA), thereby granting the molecule extended half-life in the absence of an Ig Fc domain. Three glycine, serine, alanine and/or threonine rich linkers exists between domains 1 and 2, domains 2 and 3, and domains 3 and 4. This format may be configured with up to tetraspecificity, but monovalent in each case, or to have bispecificity with bivalency in each case. The order of domains can be changed. Again, in this format, any of the antibody moieties can be substituted with a non-antibody moiety, e.g., a effector binding/modulating moiety that does not comprise an antibody molecule.

[0103] FIG. 11 illustrates yet another approach. This example is similar to FIGS. 3 and 4, in that it is Fc homodimer based with two identical Fab units (bivalent mono specificity) at the N-terminus of the molecule. This example differs from FIGS. 3 and 4 in that the C-terminus of each heavy chain is appended with a tandem-scFv. Thus, in each case the C-terminus of the CH3 domain of the Fc is linked via a glycine/serine/alanine/threonine based linker to the N-terminus of a first VH domain, which is linked via the C-terminus by a 12-15 amino acid glycine/serine rich linker to the N-terminus of a first VL domain, which linked via a 25-35 amino acid glycine/serine/alanine/threonine based linker at the C-terminus to the N-terminus of a second VH domain, which is linked via the C-terminus with a 12-15 amino acid glycine/serine based linker to the N-terminus of a 2nd VL domain. In this Fc homodimer based molecule there are therefore two identical tandem scFvs at the C-terminus of the molecule offering either tetravalency for a single tissue antigen for example or bivalency to two different molecules. This format could also be adapted with a heterodimer Fc core allowing two different tandem-scFvs at the C-terminus of the Fc allowing for monovalent tetraspecificity at the C-terminus while retaining either bivalent monospecificity at the N-terminus or monovalent bispecificity at the N-terminal via usage of single chain Fab configurations as in FIGS. 5, 6, and 7. This molecule can therefore be configured to have 2, 3, 4, 5, or 6 specificities. The domain order of scFvs within the tandem-scFv units may be configured to be from N to C terminus either VH-Linker-VL or VL-Linker-VH. Again, in this format, any of the antibody moieties at any of the four attachment/fusion points can be substituted with a non-antibody moiety, e.g., an effector binding/modulating moiety that does not comprise an antibody molecule.

[0104] Bi-specific antibodies can also be constructed to have, for example, shorter systemic PK while having increased tissue penetration. These types of antibodies can be based upon, for example, a human VH3 based domain antibody format. These are illustrated, for example, in FIGS. 12, 13, and 14. FIGS. 12, 13, and 14 each comprised a soluble VH3 germline family based VH domain modules. Each domain is approximately 12.5 kDa allowing for a small overall MW, which, without being bound to any particular theory, should be beneficial for enhanced tissue penetration. In these examples, none of the VH domains recognize any half-life extending targets such as FcRn or HSA. As illustrated in FIG. 12, the molecule is comprised of two VH domains joined with a flexible hydrophilic glycine/serine based linker between the C-terminus of the first domain and N-terminus of the second domain. In this example one domain may recognize a T cell co-stimulatory receptor and the second may recognize a tissue tethering antigen. As illustrated in FIG. 13, the molecule is comprised of three VH domains with N-C terminal linkages of hydrophilic glycine/serine based linkers. The molecule may be configured to be trispecific but monovalent for each target. It may be bispecific with bivalency for one target and monovalency for another. As illustrated in FIG. 14, the molecule is comprised of four VH domains with N-C terminal Glycine/Serine rich linkers between each domain. This molecule may be configured to be tetraspecific, trispecific, or bispecific with varying antigenic valencies in each case. Again, in this format, any of the antibody moieties at can be substituted with a non-antibody moiety, e.g., an effector binding/modulating moiety that does not comprise an antibody molecule.

[0105] Other embodiments of bi-specific antibodies are illustrated in FIGS. 15 and 16. FIGS. 15 and 16 are comprised of the naturally heterodimerizing core of the human IgG CH1/Ckappa interface, including the C-terminal heavy/light disulfide bond which covalently anchors the interaction. This format does not contain an Fc or any moieties for half-life extension. As illustrated in FIG. 15, the molecule, at the N-terminus of the constant kappa domain is appended with an scFv fragment consisting of an N-terminal VH domain, linked at its C-terminus to the N-terminus of a VL domain via a 12-15 amino acid gly/ser based linker, which is linked by its C-terminus to the N-terminus of the constant kappa domain via the native VL-Ckappa elbow sequence. The CH1 domain is appended at the N-terminus with an scFv fragment consisting of an N-terminal VL domain linked at its c-terminus via a 12-15 amino acid gly/ser linker to the N-terminus of a VH domain, which is linked at its C-terminus to the N-terminus of the CH1 domains via the natural VH-CH1 elbow sequence. As illustrated in FIG. 16, the molecule has the same N-terminal configuration to Example 13. However the C-terminus of the constant kappa and CH1 domains are appended with scFv modules which may be in either the VH-VL or VL-VH configuration and may be either specific for the same antigen or specific for two different antigens. The VH/VL inter-domain linkers may be 12-15 amino acids in length and consisting of gly/ser residues. The scFv binding sub-units may be swapped for soluble VH domains, or peptide recognition elements, or even tandem-scFv elements. This approach can also be configured to use variable lambda and/or constant lambda domains. Again, in this format, any of the antibody moieties at any of the attachment/fusion points can be substituted with a non-antibody moiety, e.g., an effector binding/modulating moiety that does not comprise an antibody molecule.

[0106] FIG. 17 illustrates another embodiment. FIG. 17 represents a tandem scFv format consisting of a first N-terminal VL domain linked at its C-terminus to the N-terminus of a first VH domain with a 12-15 amino acid gly/ser rich linker, followed at the first VH c-terminus by a 25-30 amino acid gly/ser/ala/thr based linker to the N-terminus of a second VL domain. The second VL domain is linked at the C-terminus to the N-terminus of a 2nd VH domain by a 12-15 amino acid gly/ser linker. Each scFv recognizes a different target antigen such as a co-stimulatory T cell molecule and a tissue tethering target. Again, in this format, any of the antibody moieties can be substituted with a non-antibody moiety, e.g., an effector binding/modulating moiety that does not comprise an antibody molecule.

[0107] FIG. 18 illustrates another embodiment. FIG. 18 is a F(ab′)2 scFv fusion. This consists of two identical Fab components joined via two disulfide bonds in the native human IgG1 hinge region C-terminal of the human IgG CH1 domain. The human IgG1 CH2 and CH3 domains are absent. At the C-terminus of heavy chains 1 and 2 are two identical scFv fragments linked via a gly/ser/ala/thr rich linker to the c-terminus of the huIgG1 hinge region. In the configuration shown, the VH is N-terminal in each scFv unit and linked via a 12-15 amino acid gly/ser rich linker to the N-terminus of a VL domain. An alternative configuration is N-term-VL-Linker-VH-C-term. In this design, the construct is bispecific with bivalency for reach target. Again, in this format, any of the antibody moieties at any of the four attachment/fusion points can be substituted with a non-antibody moiety, e.g., an effector binding/modulating moiety that does not comprise an antibody molecule.

[0108] CD39 molecule, as that term as used herein, refers to a polypeptide having sufficient CD39 sequence that, as part of a therapeutic compound, it phosphohydrolyzes ATP to AMP. In some embodiments, a CD39 molecule phosphohydrolizes ATP to AMP equivalent to, or at least, 10, 20, 30, 40, 50, 60, 70, 80, 90, or 95% of the rate of a naturally occurring CD39, e.g., the CD39 from which the CD39 molecule was derived. In some embodiments, a CD39 molecule has at least 60, 70, 80, 90, 95, 99, or 100% sequence identity, or substantial sequence identity, with a naturally occurring CD39.

[0109] Any functional isoform can be used (with CD39 or other proteins discussed herein). Exemplary CD39 sequence include Genbank accession #NP_001767.3 or a mature form from the following sequence:

(SEQ ID NO: 1)
MEDTKESNVKTFCSKNILAILGESSIIAVIALLAVGLTQNKALPENVK
YGIVLDAGSSHTSLYIYKWPAEKENDTGVVHQVEECRVKGPGISKEVQ
KVNEIGIYLTDCMERAREVIPRSQHQETPVYLGATAGMRLLRMESEEL
ADRVLDVVERSLSNYPFDFQGARIITGQEEGAYGWITINYLLGKFSQK
TRWFSIVPYETNNQETFGALDLGGASTQVTFVPQNQTIESPDNALQFR
LYGKDYNVYTHSFLCYGKDQALWQKLAKDIQVASNEILRDPCFHPGYK
KVVNVSDLYKTPCTKRFEMTLPFQQFEIQGIGNYQQCHQSILELENTS
YCPYSQCAFNGIFLPPLQGDFGAFSAFYFVMKFLNLTSEKVSQEKVTE
MMKKFCAQPWEEIKTSYAGVKEKYLSEYCESGTYILSLLLQGYHFTAD
SWEHIHFIGKIQGSDAGWTLGYMLNLTNMIPAEQPLSTPLSHSTYVFL
MVLFSLVLFTVAIIGLLIFHKPSYFWKDMV.

[0110] In some embodiments, a CD39 molecule comprises a soluble catalytically active form of CD39 found to circulate in human or murine serum, see, e.g., Metabolism of circulating ADP in the bloodstream is mediated via integrated actions of soluble adenylate kinase-1 and NTPDase1/CD39 activities, Yegutkin et al. FASEB J. 2012 September; 26(9):3875-83. A soluble recombinant CD39 fragment is also described in Inhibition of platelet function by recombinant soluble ecto-ADPase/CD39, Gayle, et al., J Clin Invest. 1998 May 1; 101(9): 1851-1859.

[0111] CD73 molecule, as that term as used herein, refers to a polypeptide having sufficient CD73 sequence that, as part of a therapeutic compound, it dephosphorylates extracellular AMP to adenosine. In some embodiments, a CD73 molecule dephosphorylates extracellular AMP to adenosine equivalent to, or at least, 10, 20, 30, 40, 50, 60, 70, 80, 90, or 95% of the rate of a naturally occurring CD73, e.g., the CD73 from which the CD73 molecule was derived. In some embodiments, a CD73 molecule has at least 60, 70, 80, 90, 95, 99, or 100% sequence identity, or substantial sequence identity, with a naturally occurring CD73. Exemplary CD73 sequences include GenBank AAH65937.1 5′-nucleotidase, ecto (CD73) [Homo sapiens] or a mature form from the following sequence,

(SEQ ID NO: 2)
MCPRAARAPATLLLALGAVLWPAAGAWELTILHTNDVHSRLEQTSEDS
SKCVNASRCMGGVARLFTKVQQIRRAEPNVLLLDAGDQYQGTIWFTVY
KGAEVAHFMNALRYDAMALGNHEFDNGVEGLIEPLLKEAKFPILSANI
KAKGPLASQISGLYLPYKVLPVGDEVVGIVGYTSKETPFLSNPGTNLV
FEDEITALQPEVDKLKTLNVNKIIALGHSGFEMDKLIAQKVRGVDVVV
GGHSNTFLYTGNPPSKEVPAGKYPFIVTSDDGRKVPVVQAYAFGKYLG
YLKIEFDERGNVISSHGNPILLNSSIPEDPSIKADINKWRIKLDNYST
QELGKTIVYLDGSSQSCRFRECNMGNLICDAMINNNLRHADETFWNHV
SMCILNGGGIRSPIDERNNGTITWENLAAVLPFGGTFDLVQLKGSTLK
KAFEHSVHRYGQSTGEFLQVGGIHVVYDLSRKPGDRVVKLDVLCTKCR
VPSYDPLKMDEVYKVILPNFLANGGDGFQMIKDELLRHDSGDQDINVV
STYISKMKVIYPAVEGRIKESTGSHCHGSFSLIFLSLWAVIFVLYQ.

[0112] In some embodiments, a CD73 molecule comprises a soluble form of CD73 which can be shed from the membrane of endothelial cells by proteolytic cleavage or hydrolysis of the GPI anchor by shear stress see, e.g., Reference: Yegutkin G, Bodin P, Bumstock G. Effect of shear stress on the release of soluble ecto-enzymes ATPase and 5′-nucleotidase along with endogenous ATP from vascular endothelial cells. Br J Pharmacol 2000; 129: 921-6. For CD73 function see Colgan et al., Physiological roles for ecto-5′-nucleotidase (CD73), Purinergic Signalling, June 2006, 2:351.

[0113] Cell surface molecule binder, as that term is used herein, refers to a molecule, typically a polypeptide, that binds, e.g., specifically, to a cell surface molecule on a cell, e.g., an immunosuppressive immune cell, e.g., a Treg. In some embodiments, the cell surface binder has sufficient sequence from a naturally occurring ligand of the cell surface molecule, that it can specifically bind the cell surface molecule (a cell surface molecule ligand). In some embodiments, the cell surface binding is an antibody molecule that binds, e.g., specifically binds, the cell surface molecule.

[0114] Donor specific targeting moiety, as that term is used herein, refers to a moiety, e.g., an antibody molecule, that as a component of a therapeutic compound, localizes the therapeutic compound preferentially to an implanted donor tissue, as opposed to tissue of a recipient. As a component of a therapeutic compound, the donor specific targeting moiety provides site-specific immune privilege for a transplant tissue, e.g., an organ, from a donor.

[0115] In some embodiments, a donor specific targeting moiety it binds to the product, e.g., a polypeptide product, of an allele present at a locus, which allele is not present at the locus in the (recipient) subject. In some embodiments, a donor specific targeting moiety binds to an epitope on product, which epitope is not present in the (recipient) subject.

[0116] In some embodiments, a donor specific targeting moiety, as a component of a therapeutic compound, preferentially binds to a donor target or antigen, e.g., has a binding affinity for the donor target that is greater for donor antigen or tissue, e.g., at least 2, 4, 5, 10, 50, 100, 500, 1,000, 5,000, or 10,000 fold greater, than its affinity for than for subject antigen or tissue. In some embodiments, a donor specific targeting moiety, has a binding affinity for a product of an allele of a locus present in donor tissue (but not present in the subject) at least 2, 4, 5, 10, 50, 100, 500, 1,000, 5,000, or 10,000 fold greater, than its affinity for the product of the allele of the locus present in the subject (which allele is not present in donor tissue). Affinity of a therapeutic compound of which the donor specific moiety is a component, can be measured in a cell suspension, e.g., the affinity for suspended cells having the allele is compared with its affinity for suspended cells not having the allele. In some embodiments, the binding affinity for the donor allele cells is below 10 nM. In some embodiments, the binding affinity for the donor allele cells is below 100 pM, 50 pM, or 10 pM.

[0117] In some embodiments, the specificity for a product of a donor allele is sufficient that when the donor specific targeting moiety is coupled to an immune-down regulating effector: i) immune attack of the implanted tissue, e.g., as measured by histological inflammatory response, infiltrating T effector cells, or organ function, in the clinical setting—e.g. creatinine for the kidney, is substantially reduced, e.g., as compared to what would be seen in an otherwise similar implant but lacking the donor specific targeting moiety is coupled to an immune-down regulating effector; and/or ii) immune function in the recipient, outside or away from the implanted tissue, is substantially maintained. In some embodiments, one or more of the following is seen: at therapeutic levels of therapeutic compound, peripheral blood lymphocyte counts are not substantially impacted, e.g., the level of T cells is within 25, 50, 75, 85, 90, or 95% of normal, the level of B cells is within 25, 50, 75, 85, 90, or 95% of normal, and/or the level of granuloctyes (PMNs) cells is within 25, 50, 75, 85, 90, or 95% of normal, or the level of monocytes is within 25, 50, 75, 85, 90, or 95% of normal; at therapeutic levels of therapeutic compound, the ex vivo proliferative function of PBMCs (peripheral blood mononuclear cells) against non-disease relevant antigens is substantially normal or is within 70, 80, or 90% of normal; at therapeutic levels of therapeutic compound, the incidence or risk of risk of opportunistic infections and cancers associated with immunosuppression is not substantially increased over normal; or at therapeutic levels of therapeutic compound, the incidence or risk of risk of opportunistic infections and cancers associated with immunosuppression is substantially less than would be seen with standard of care, or non-targeted, immunosuppression. In some embodiments, the donor specific targeting moiety comprises an antibody molecule, a target specific binding polypeptide, or a target ligand binding molecule.

[0118] Elevated risk, as used herein, refers to the risk of a disorder in a subject, wherein the subject has one or more of a medical history of the disorder or a symptom of the disorder, a biomarker associated with the disorder or a symptom of the disorder, or a family history of the disorder or a symptom of the disorder.

[0119] Functional antibody molecule to an effector or inhibitory immune checkpoint molecule, as that term is used herein, refers to an antibody molecule that when present as the ICIM binding/modulating moiety of a multimerized therapeutic compound, can bind and agonize the effector or inhibitory immune checkpoint molecule. In some embodiments, the anti-effector or inhibitory immune checkpoint molecule antibody molecule, when binding as a monomer (or binding when the therapeutic compound is not multimerized), to the effector or inhibitory immune checkpoint molecule, does not antagonize, substantially antagonize, prevent binding, or prevent substantial binding, of an endogenous counter ligand of the inhibitory immune checkpoint molecule to inhibitory immune checkpoint molecule. In some embodiments, the anti-effector or inhibitory immune checkpoint molecule antibody molecule when binding as a monomer (or binding when the therapeutic compound is not multimerized), to the inhibitory immune checkpoint molecule, does not agonize or substantially agonize, the effector or inhibitory molecule.

[0120] ICIM binding/modulating moiety, as that term is used herein, refers to an effector binding/modulating moiety that, as part of a therapeutic compound, binds and agonizes a cell surface inhibitory molecule, e.g., an inhibitory immune checkpoint molecule, e.g., PD-1, or binds or modulates cell signaling, e.g., binds a FCRL, e.g., FCRL1-6, or binds and antagonizes a molecule that promotes immune function.

[0121] IIC binding/modulating moiety, as that term is used herein, refers to an effector binding/modulating moiety that, as part of a therapeutic compound, binds an immunosuppressive immune cell. In some embodiments, the IIC binding/modulating moiety increases the number or concentration of an immunosuppressive immune cell at the binding site.

[0122] ICSM binding/modulating moiety, as that term is used herein, refers to an effector binding/modulating moiety that antagonizes an immune stimulatory effect of a stimulatory, e.g., co-stimulatory, binding pair. A stimulatory or co-stimulatory binding pair, as that term is used herein, comprises two members, 1) a molecule on the surface of an immune cell; and 2) the binding partner for that cell molecule, which may be an additional immune cell, or a non-immune cell. Ordinarily, upon binding of one member to the other, assuming other requirements are met, the member on the immune cell surfaces stimulates the immune cell, e.g., a costimulatory molecule, and an immune response is promoted. In situations where the costimulatory molecule and the costimulatory molecule counter structure are both expressed on immune cells, bi-directional activation of both cells may occur. In an embodiment an ICSM binding/modulating moiety binds and antagonizes the immune cell expressed member of a binding pair. For example, it binds and antagonizes OX40. In another embodiment, an ICSM binding/modulating moiety binds and antagonizes the member of the binding pair that itself binds the immune cell expressed member, e.g., it binds and antagonizes OX40L. In either case, inhibition of stimulation or co-stimulation of an immune cell is achieved. In an embodiment the ICSM binding/modulating moiety decreases the number or the activity of an immunostimulating immune cell at the binding site.

### Inhibitory Immune Checkpoint Molecules

[0123] An “inhibitory immune checkpoint molecule ligand molecule,” as that term is used herein, refers to a polypeptide having sufficient inhibitory immune checkpoint molecule ligand sequence, e.g., in the case of a PD-L1 molecule, sufficient PD-L1 sequence, that when present as an ICIM binding/modulating moiety of a multimerized therapeutic compound, can bind and agonize its cognate inhibitory immune checkpoint molecule, e.g., again in the case of a PD-L1 molecule, PD-1.

[0124] In some embodiments, the inhibitory immune checkpoint molecule ligand molecule, e.g., a PD-L1 molecule, when binding as a monomer (or binding when the therapeutic compound is not multimerized), to its cognate ligand, e.g., PD-1, does not antagonize or substantially antagonize, or prevent binding, or prevent substantial binding, of an endogenous inhibitory immune checkpoint molecule ligand to the inhibitory immune checkpoint molecule. E.g., in the case of a PD-L1 molecule, the PD-L1 molecule does not antagonize binding of endogenous PD-L1 to PD-1.

[0125] In some embodiments, the inhibitory immune checkpoint molecule ligand when binding as a monomer, to its cognate inhibitory immune checkpoint molecule does not agonize or substantially agonize the inhibitory immune checkpoint molecule. By way of example, e.g., a PD-L1 molecule when binding to PD-1, does not agonize or substantially agonize PD-1.

[0126] In some embodiments, an inhibitory immune checkpoint molecule ligand molecule has at least 60, 70, 80, 90, 95, 99, or 100% sequence identity, or substantial sequence identity, with a naturally occurring inhibitory immune checkpoint molecule ligand.

[0127] Exemplary inhibitory immune checkpoint molecule ligand molecules include: a PD-L1 molecule, which binds to inhibitory immune checkpoint molecule PD-1, and in embodiments has at least 60, 70, 80, 90, 95, 99, or 100% sequence identity, or substantial sequence identity, with a naturally occurring PD-L1, e.g., the PD-L1 molecule comprising the sequence of

(SEQ ID NO: 3)
MRIFAVFIFMTYWHLLNAFTVTVPKDLYVVEYGSNMTIECKFPVEKQL
DLAALIVYWEMEDKNIIQFVHGEEDLKVQHSSYRQRARLLKDQLSLGN
AALQITDVKLQDAGVYRCMISYGGADYKRITVKVNAPYNKINQRILVV
DPVTSEHELTCQAEGYPKAEVIWTSSDHQVLSGKTTTTNSKREEKLEN
VTSTLRINTTTNEIFYCTFRRLDPEENHTAELVIPELPLAHPPNERTH
LVILGAILLCLGVALTFIERLRKGRMMDVKKCGIQDTNSKKQSDTHLE
ET,

or an active fragment thereof; in some embodiments, the active fragment comprises residues 19 to 290 of the PD-L1 sequence; an HLA-G molecule, which binds to any of inhibitory immune checkpoint molecules KIR2DL4, LILRB1, and LILRB2, and in embodiments has at least 60, 70, 80, 90, 95, 99, or 100% sequence identity, or substantial sequence identity, with a naturally occurring HLA-G. Exemplary HLA-G sequences include, e.g., a mature form found in the sequence at GenBank P17693.1 RecName: Full=HLA class I histocompatibility antigen, alpha chain G; AltName: Full=HLA G antigen; AltName: Full=MHC class I antigen G; Flags: Precursor, or in the sequence

(SEQ ID NO: 4)
MVVMAPRTLFLLLSGALTLTETWAGSHSMRYFSAAVSRPGRGEPRFIA
MGYVDDTQFVRFDSDSACPRMEPRAPWVEQEGPEYWEEETRNTKAHAQ
TDRMNLQTLRGYYNQSEASSHTLQWMIGCDLGSDGRLLRGYEQYAYDG
KDYLALNEDLRSWTAADTAAQISKRKCEAANVAEQRRAYLEGTCVEWL
HRYLENGKEMLQRADPPKTHVTHHPVEDYEATLRCWALGFYPAEIILT
WQRDGEDQTQDVELVETRPAGDGTFQKWAAVVVPSGEEQRYTCHVQHE
GLPEPLMLRWKQSSLPTIPIMGIVA.

[0128] Inhibitory molecule counter ligand molecule, as that term is used herein, refers to a polypeptide having sufficient inhibitory molecule counter ligand sequence such that when present as the ICIM binding/modulating moiety of a multimerized therapeutic compound, can bind and agonize a cognate inhibitory molecule. In some embodiments, the inhibitory molecule counter ligand molecule, when binding as a monomer (or binding when the therapeutic compound is not multimerized), to the inhibitory molecule, does not antagonize, substantially antagonize, prevent binding, or prevent substantial binding, of an endogenous counter ligand of the inhibitory molecule to the inhibitory molecule. In some embodiments, the inhibitory molecule counter ligand molecule when binding as a monomer (or binding when the therapeutic compound is not multimerized), to the inhibitory molecule, does not agonize or substantially agonize, the inhibitory molecule.

[0129] Sequence identity, percentage identity, and related terms, as those terms are used herein, refer to the relatedness of two sequences, e.g., two nucleic acid sequences or two amino acid or polypeptide sequences. In the context of an amino acid sequence, the term “substantially identical” is used herein to refer to a first amino acid that contains a sufficient or minimum number of amino acid residues that are i) identical to, or ii) conservative substitutions of aligned amino acid residues in a second amino acid sequence such that the first and second amino acid sequences can have a common structural domain and/or common functional activity. For example, amino acid sequences that contain a common structural domain having at least about 85%, 90%. 91%, 92%, 93%, 94%, 95%, 96%, 97%, 98% or 99% identity to a reference sequence, e.g., a sequence provided herein.

[0130] In the context of nucleotide sequence, the term “substantially identical” is used herein to refer to a first nucleic acid sequence that contains a sufficient or minimum number of nucleotides that are identical to aligned nucleotides in a second nucleic acid sequence such that the first and second nucleotide sequences encode a polypeptide having common functional activity, or encode a common structural polypeptide domain or a common functional polypeptide activity. For example, nucleotide sequences having at least about 85%, 90%, 91%, 92%, 93%, 94%, 95%, 96%, 97%, 98% or 99% identity to a reference sequence, e.g., a sequence provided herein.

[0131] The term “functional variant” refers to polypeptides that have a substantially identical amino acid sequence to the naturally-occurring sequence, or are encoded by a substantially identical nucleotide sequence, and are capable of having one or more activities of the naturally-occurring sequence.

[0132] Calculations of homology or sequence identity between sequences (the terms are used interchangeably herein) are performed as follows.

[0133] To determine the percent identity of two amino acid sequences, or of two nucleic acid sequences, the sequences are aligned for optimal comparison purposes (e.g., gaps can be introduced in one or both of a first and a second amino acid or nucleic acid sequence for optimal alignment and non-homologous sequences can be disregarded for comparison purposes). In a preferred embodiment, the length of a reference sequence aligned for comparison purposes is at least 30%, preferably at least 40%, more preferably at least 50%, 60%, and even more preferably at least 70%, 80%, 90%, 100% of the length of the reference sequence. The amino acid residues or nucleotides at corresponding amino acid positions or nucleotide positions are then compared. When a position in the first sequence is occupied by the same amino acid residue or nucleotide as the corresponding position in the second sequence, then the molecules are identical at that position (as used herein amino acid or nucleic acid “identity” is equivalent to amino acid or nucleic acid “homology”).

[0134] The percent identity between the two sequences is a function of the number of identical positions shared by the sequences, taking into account the number of gaps, and the length of each gap, which need to be introduced for optimal alignment of the two sequences.

[0135] The comparison of sequences and determination of percent identity between two sequences can be accomplished using a mathematical algorithm. In a preferred embodiment, the percent identity between two amino acid sequences is determined using the Needleman and Wunsch ((1970) J. Mol. Biol. 48:444-453) algorithm which has been incorporated into the GAP program in the GCG software package (available at http://www.gcg.com), using either a Blossum 62 matrix or a PAM250 matrix, and a gap weight of 16, 14, 12, 10, 8, 6, or 4 and a length weight of 1, 2, 3, 4, 5, or 6. In yet another preferred embodiment, the percent identity between two nucleotide sequences is determined using the GAP program in the GCG software package (available at http://www.gcg.com), using a NWSgapdna.CMP matrix and a gap weight of 40, 50, 60, 70, or 80 and a length weight of 1, 2, 3, 4, 5, or 6. A particularly preferred set of parameters (and the one that should be used unless otherwise specified) are a Blossum 62 scoring matrix with a gap penalty of 12, a gap extend penalty of 4, and a frameshift gap penalty of 5.

[0136] The percent identity between two amino acid or nucleotide sequences can be determined using the algorithm of E. Meyers and W. Miller ((1989) CABIOS, 4:11-17) which has been incorporated into the ALIGN program (version 2.0), using a PAM120 weight residue table, a gap length penalty of 12 and a gap penalty of 4.

[0137] The nucleic acid and protein sequences described herein can be used as a “query sequence” to perform a search against public databases to, for example, identify other family members or related sequences. Such searches can be performed using the NBLAST and XBLAST programs (version 2.0) of Altschul, et al. (1990) J. Mol. Biol. 215:403-10. BLAST nucleotide searches can be performed with the NBLAST program, score=100, wordlength=12 to obtain nucleotide sequences homologous to for example any a nucleic acid sequence provided herein. BLAST protein searches can be performed with the XBLAST program, score=50, wordlength=3 to obtain amino acid sequences homologous to protein molecules provided herein. To obtain gapped alignments for comparison purposes, Gapped BLAST can be utilized as described in Altschul et al., (1997) Nucleic Acids Res. 25:3389-3402. When utilizing BLAST and Gapped BLAST programs, the default parameters of the respective programs (e.g., XBLAST and NBLAST) can be used. See http://www.ncbi.nlm.nih.gov. As used herein, the term “hybridizes under low stringency, medium stringency, high stringency, or very high stringency conditions” describes conditions for hybridization and washing. Guidance for performing hybridization reactions can be found in Current Protocols in Molecular Biology, John Wiley & Sons, N.Y. (1989), 6.3.1-6.3.6, which is incorporated by reference. Aqueous and nonaqueous methods are described in that reference and either can be used. Specific hybridization conditions referred to herein are as follows: 1) low stringency hybridization conditions in 6× sodium chloride/sodium citrate (SSC) at about 45° C., followed by two washes in 0.2×SSC, 0.1% SDS at least at 50° C. (the temperature of the washes can be increased to 55° C. for low stringency conditions); 2) medium stringency hybridization conditions in 6×SSC at about 45° C., followed by one or more washes in 0.2×SSC, 0.1% SDS at 60° C.; 3) high stringency hybridization conditions in 6×SSC at about 45° C., followed by one or more washes in 0.2×SSC, 0.1% SDS at 65° C.; and preferably 4) very high stringency hybridization conditions are 0.5M sodium phosphate, 7% SDS at 65° C., followed by one or more washes at 0.2×SSC, 1% SDS at 65° C. Very high stringency conditions (4) are the preferred conditions and the ones that should be used unless otherwise specified.

[0138] It is understood that the molecules and compounds of the present embodiments may have additional conservative or non-essential amino acid substitutions, which do not have a substantial effect on their functions.

[0139] The term “amino acid” is intended to embrace all molecules, whether natural or synthetic, which include both an amino functionality and an acid functionality and capable of being included in a polymer of naturally-occurring amino acids. Exemplary amino acids include naturally-occurring amino acids; analogs, derivatives and congeners thereof; amino acid analogs having variant side chains; and all stereoisomers of any of any of the foregoing. As used herein the term “amino acid” includes both the D- or L-optical isomers and peptidomimetics.

[0140] A “conservative amino acid substitution” is one in which the amino acid residue is replaced with an amino acid residue having a similar side chain. Families of amino acid residues having similar side chains have been defined in the art. These families include amino acids with basic side chains (e.g., lysine, arginine, histidine), acidic side chains (e.g., aspartic acid, glutamic acid), uncharged polar side chains (e.g., glycine, asparagine, glutamine, serine, threonine, tyrosine, cysteine), nonpolar side chains (e.g., alanine, valine, leucine, isoleucine, proline, phenylalanine, methionine, tryptophan), beta-branched side chains (e.g., threonine, valine, isoleucine) and aromatic side chains (e.g., tyrosine, phenylalanine, tryptophan, histidine). CD39 molecule, a CD73 molecule, a Cell surface molecule binder, Donor specific targeting moiety Effector ligand binding molecule, ICIM binding/modulating moiety IIC binding/modulating moiety, an inhibitory immune checkpoint molecule ligand molecule, Inhibitory molecule counter ligand molecule, SM binding/modulating moiety, or ICSM binding/modulating moiety.

[0141] SM binding/modulating moiety, as that term is used herein, refers to an effector binding/modulating moiety that, as part of a therapeutic compound, promotes an immuno-suppressive local microenvironment, e.g., by providing in the proximity of the target, a substance that inhibits or minimizes attack by the immune system of the target. In some embodiments, the SM binding/modulating moiety comprises, or binds, a molecule that inhibits or minimizes attack by the immune system of the target. In some embodiments, a therapeutic compound comprises an SM binding/modulating moiety that binds and accumulates a soluble substance, e.g., an endogenous or exogenous substance, having immunosuppressive function. In some embodiments, a therapeutic compound comprises an SM binding/modulating moiety that binds and inhibits, sequesters, degrades or otherwise neutralizes a substance, e.g., a soluble substance, typically and endogenous soluble substance, that promotes immune attack. In some embodiments, a therapeutic compound comprises an SM binding/modulating moiety that comprises an immune-suppressive substance, e.g. a fragment of protein known to be immunosuppressive. By way of example, an effector molecule binding moiety that binds, or comprises, a substance e.g., a CD39 molecule or a CD73 molecule, that depletes a component, that promotes immune effector cell function, e.g., ATP or AMP.

[0142] Specific targeting moiety, as that term is used herein, refers to donor specific targeting moiety or a tissue specific targeting moiety.

[0143] Subject, as that term is used herein, refers to a mammalian subject, e.g., a human subject. In some embodiments, the subject is a non-human mammal, e.g., a horse, dog, cat, cow, goat, or pig.

[0144] Target ligand binding molecule, as used herein, refers to a polypeptide that has sufficient sequence from a naturally occurring counter-ligand of a target ligand that it can bind the target ligand on a target tissue (e.g., donor tissue or subject target tissue) with sufficient specificity that it can serve as a specific targeting moiety. In some embodiments, it binds to target tissue or cells with at least 10, 20, 30, 40, 50, 60, 70, 80, 90, or 95% of the affinity of the naturally occurring counter-ligand. In some embodiments, it has at least 60, 70, 80, 90, 95, 99, or 100% sequence identity, or substantial sequence identity, with a naturally occurring counter-ligand for the target ligand.

[0145] Target site, as that term is used herein, refers to a site which contains the entity, e.g., epitope, bound by a targeting moiety. In some embodiments, the target site is the site at which immune privilege is established.

[0146] Tissue specific targeting moiety, as that term is used herein, refers to a moiety, e.g., an antibody molecule, that as a component of a therapeutic molecule, localizes the therapeutic molecule preferentially to a target tissue, as opposed to other tissue of a subject. As a component of a therapeutic compound, the tissue specific targeting moiety provides site-specific immune privilege for a target tissue, e.g., an organ or tissue undergoing or at risk for autoimmune attack. In some embodiments, a tissue specific targeting moiety binds to a product, e.g., a polypeptide product, which is not present outside the target tissue, or is present at sufficiently low levels that, at therapeutic concentrations of therapeutic molecule, unacceptable levels of immune suppression are absent or substantially absent. In some embodiments, a tissue specific targeting moiety binds to an epitope, which epitope is not present outside, or not substantially present outside, the target site.

[0147] In some embodiments, a tissue specific targeting moiety, as a component of a therapeutic compound, preferentially binds to a target tissue or target tissue antigen, e.g., has a binding affinity for the target tissue or antigen that is greater for target antigen or tissue, e.g., at least 2, 4, 5, 10, 50, 100, 500, 1,000, 5,000, or 10,000 fold greater, than its affinity for than for non-target tissue or antigen present outside the target tissue. Affinity of a therapeutic compound of which the tissue specific moiety is a component, can be measured in a cell suspension, e.g., the affinity for suspended cells having the target antigen is compared with its affinity for suspended cells not having the target antigen. In some embodiments, the binding affinity for the target antigen bearing cells is below 10 nM.

[0148] In some embodiments, the binding affinity for the target antigen bearing cells is below 100 pM, 50 pM, or 10 pM. In some embodiments, the specificity for a target antigen is sufficient, that when the tissue specific targeting moiety is coupled to an immune-down regulating effector: i) immune attack of the target tissue, e.g., as measured by histological inflammatory response, infiltrating T effector cells, or organ function, in the clinical setting—e.g. creatinine for kidney, is substantially reduced, e.g., as compared to what would be seen in an otherwise similar implant but lacking the tissue specific targeting moiety is coupled to an immune-down regulating effector; and/or ii) immune function in the recipient, outside or away from the target tissue, is substantially maintained.

[0149] In some embodiments, one or more of the following is seen: at therapeutic levels of therapeutic compound, peripheral blood lymphocyte counts are not substantially impacted, e.g., the level of T cells is within 25, 50, 75, 85, 90, or 95% of normal, the level of B cells is within 25, 50, 75, 85, 90, or 95% of normal, and/or the level of granulocytes (PMNs) cells is within 25, 50, 75, 85, 90, or 95% of normal, or the level of monocytes is within 25, 50, 75, 85, 90, or 95% of normal 1; at therapeutic levels of therapeutic compound, the ex vivo proliferative function of PBMCs (peripheral blood mononuclear cells) against non-disease relevant antigens is substantially normal or is within 70, 80, or 90% of normal; at therapeutic levels of therapeutic compound, the incidence or risk of risk of opportunistic infections and cancers associated with immunosuppression is not substantially increased over normal; or at therapeutic levels of therapeutic compound, the incidence or risk of risk of opportunistic infections and cancers associated with immunosuppression is substantially less than would be seen with standard of care, or non-targeted, immunosuppression. In some embodiments, the tissue specific targeting moiety comprises an antibody molecule. In some embodiments, the donor specific targeting moiety comprises an antibody molecule, a target specific binding polypeptide, or a target ligand binding molecule. In some embodiments, the tissue specific targeting moiety binds a product, or a site on a product, that is present or expressed exclusively, or substantially exclusively, on target tissue.

ICIM Binding/Modulating Moieties: Effector Binding/Modulating Moieties that Bind Inhibitory Receptors

[0150] Methods and compounds described herein provide for a therapeutic compound having an effector binding/modulating moiety comprising an ICIM binding/modulating moiety, that directly binds and activates an inhibitory receptor on the surface of an immune cell, e.g., to reduce or eliminate, or substantially eliminate, the ability of the immune cell to mediate immune attack. Coupling of the ICIM binding/modulating moiety to a targeting entity, promotes site-specific or local down regulation of the immune cell response, e.g., confined substantially to the locations having binding sites for the targeting moiety. Thus, normal systemic immune function is substantially retained. In some embodiments, an ICIM binding/modulating moiety comprises an inhibitory immune checkpoint molecule counter ligand molecule, e.g., a natural ligand, or fragment of a natural ligand (e.g., PD-L1 or HLA-G) of the inhibitory immune checkpoint molecule. In some embodiments, an ICIM binding/modulating moiety comprises a functional antibody molecule, e.g., a functional antibody molecule comprising an scFv binding domain, that engages inhibitory immune checkpoint molecule.

[0151] In some embodiments, the ICIM binding/modulating moiety, comprising, e.g., a functional antibody molecule, or inhibitory immune checkpoint molecule ligand molecule, binds the inhibitory receptor but does not prevent binding of a natural ligand of the inhibitory receptor to the inhibitory receptor. In embodiments a format is used wherein a targeting moiety is coupled, e.g., fused, to an ICIM binding/modulating moiety, comprising, e.g., an scFv domain, and configured so that upon binding of an inhibitory receptor while in solution (e.g., in blood or lymph) (and presumably in a monomeric format), the therapeutic molecule: i) fails to agonize, or fails to substantially agonize (e.g., agonizes at less than 30, 20, 15, 10, or 5% of the level seen with a full agonizing molecule) the inhibitory receptor on the immune cell; and/or ii) fails to antagonize, or fails to substantially antagonize (e.g., antagonizes at less than 30, 20, 15, 10, or 5% of the level seen with a full antagonizing molecule) the inhibitory receptor on the immune cell. A candidate molecule can be evaluated for its ability to agonize or not agonize by its ability to either increase or decrease the immune response in an in vitro cell based assay wherein the target is not expressed, e.g., using an MLR-based assay (mixed lymphocyte reaction).

[0152] In some embodiments, candidate ICIM binding/modulating moieties can reduce, completely or substantially eliminate systemic immunosuppression and systemic immune activation. In some embodiments, the targeting domain of the therapeutic compound, when bound to target, will serve to cluster or multimerize the therapeutic compound on the surface of the tissue desiring immune protection. In some embodiments, the ICIM binding/modulating moiety, e.g., an ICIM binding/modulating moiety comprising a scFv domain, requires a clustered or multimeric state to be able to deliver an agonistic and immunosuppressive signal, or substantial levels of such signal, to local immune cells. This type of therapeutic can, for example, provide to a local immune suppression whilst leaving the systemic immune system unperturbed or substantially unperturbed. That is, the immune suppression is localized to where the suppression is needed as opposed to being systemic and not localized to a particular area or tissue type.

[0153] In some embodiments, upon binding to the target e.g., a target organ, tissue or cell type, the therapeutic compound coats the target, e.g., target organ, tissue or cell type. When circulating lymphocytes attempt to engage and destroy the target, this therapeutic will provide an ‘off’ signal only at, or to a greater extent at, the site of therapeutic compound accumulation.

[0154] A candidate therapeutic compound can be evaluated for the ability to bind, e.g., specifically bind, its target, e.g., by ELISA, a cell based assay, or surface plasmon resonance. This property should generally be maximized, as it mediates the site-specificity and local nature of the immune privilege. A candidate therapeutic compound can be evaluated for the ability to down regulate an immune cell when bound to target, e.g., by a cell based activity assay. This property should generally be maximized, as it mediates the site-specificity and local nature of the immune privilege. The level of down regulation effected by a candidate therapeutic compound in monomeric (or non-bound) form can be evaluated, e.g., by a cell based activity assay. This property should generally be minimized, as could mediate systemic down regulation of the immune system. The level of antagonism of a cell surface inhibitory molecule, e.g., an inhibitory immune checkpoint molecule, effected by a candidate therapeutic compound in monomeric (or non-bound) form can be evaluated, e.g., by, e.g., by a cell based activity assay. This property should generally be minimized, as could mediate systemic unwanted activation of the immune system. Generally, the properties should be selected and balanced to produce a sufficiently robust site specific immune privilege without unacceptable levels of non-site specific agonism or antagonism of the inhibitory immune checkpoint molecule.

### The PD-L1/PD-1 Pathway

[0155] Programmed cell death protein 1, (often referred to as PD-1) is a cell surface receptor that belongs to the immunoglobulin superfamily. PD-1 is expressed on T cells and other cell types including, but not limited to, B cells, myeloid cells, dendritic cells, monocytes, T regulatory cells, iNK T cells. PD-1 binds two ligands, PD-L1 and PD-L2, and is an inhibitory immune checkpoint molecule. Engagement with a cognate ligand, PD-L1 or PD-L2, in the context of engagement of antigen loaded MCH with the T Cell Receptor on a T cell minimizes or prevents the activation and function of T cells. The inhibitory effect of PD-1 can include both promoting apoptosis (programmed cell death) in antigen specific T-cells in lymph nodes and reducing apoptosis in regulatory T cells (suppressor T cells).

[0156] In some embodiments, a therapeutic compound comprises an ICIM binding/modulating moiety which agonizes PD-1 inhibition. An ICIM binding/modulating moiety can include an inhibitory molecule counter ligand molecule, e.g., comprising a fragment of a ligand of PD-1 (e.g., a fragment of PD-L1 or PD-L2) or another moiety, e.g., a functional antibody molecule, comprising, e.g., an scFv domain that binds PD-1.

[0157] In some embodiments, a therapeutic compound comprises a targeting moiety that is preferentially binds a donor antigen not present in, present in substantially lower levels in the subject, e.g., a donor antigen from Table 2, and is localized to donor graft tissue in a subject. In some embodiments, it does not bind, or does not substantially bind, other tissues. In some embodiments, a therapeutic compound can include a targeting moiety that is specific for HLA-A2 and specifically binds donor allograft tissue but does not bind, or does not substantially bind, host tissues. In some embodiments, the therapeutic compound comprises an ICIM binding/modulating moiety, e.g., an inhibitory molecule counter ligand molecule, e.g., comprising a fragment of a ligand of PD-1 (e.g., a fragment of PD-L1 or PD-L2) or another moiety, e.g., a functional antibody molecule, comprising, e.g., an scFv domain that binds PD-1, such that the therapeutic compound, e.g., when bound to target, activates PD-1. The therapeutic compound targets an allograft and provides local immune privilege to the allograft.

[0158] In some embodiments, a therapeutic compound comprises a targeting moiety that is preferentially binds to an antigen of Table 3, and is localized to the target in a subject, e.g., a subject having an autoimmune disorder, e.g., an autoimmune disorder of Table 3. In some embodiments, it does not bind, or does not substantially bind, other tissues. In some embodiments, the therapeutic compound comprises an ICIM binding/modulating moiety, e.g., an inhibitory molecule counter ligand molecule, e.g., comprising a fragment of a ligand of PD-1 (e.g., a fragment of PD-L1 or PD-L2) or another moiety, e.g., a functional antibody molecule, comprising, e.g., an scFv domain that binds PD-1, such that the therapeutic compound, e.g., when bound to target, activates PD-1. The therapeutic compound targets a tissue subject to autoimmune attack and provides local immune privilege to the tissue.

[0159] PD-L1 and PDL2, or polypeptides derived therefrom, can provide candidate ICIM binding moieties. However, in monomer form, e.g., when the therapeutic compound is circulating in blood or lymph, this molecule could have an undesired effect of antagonizing the PD-L1/PD-1 pathway, and may only agonize the PD-1 pathway when clustered or multimerized on the surface of a target, e.g., a target organ. In some embodiments, a therapeutic compound comprises an ICIM binding/modulating moiety comprising a functional antibody molecule, e.g., a scFv domain, that is inert, or substantially inert, to the PD-1 pathway in a soluble form but which agonizes and drives an inhibitory signal when multimerized (by the targeting moiety) on the surface of a tissue.

[0160] The antibodies that bind to PD-1 that are provided for herein can be linked or associated with a targeting moiety as provided for herein. These can be used to modulate the PD-1/PD-L1 pathway as provided for herein.

IL-2 Mutein Molecules: IL2 Receptor Binders that Activate Tregs

[0161] IL-2 mutein molecule, as that term is used herein, refers to an IL2 variant that binds with high affinity to the CD25 (IL-2R alpha chain) and with low affinity to the other IL-2R signaling components CD122 (IL-2R beta) and CD132 (IL-2R gamma). Such an IL-2 mutein molecule preferentially activates Treg cells. In embodiments, either alone, or as a component of a therapeutic compound, an IL-2 mutein activates Tregs at least 2, 5, 10, or 100 fold more than cytotoxic or effector T cells. Exemplary IL-2 mutein molecules are described in WO2010085495, WO2016/164937, US2014/0286898A1, WO2014153111A2, WO2010/085495, cytotoxic WO2016014428A2, WO2016025385A1, and US20060269515. Muteins disclosed in these references that include additional domains, e.g., an Fc domain, or other domain for extension of half-life can be used in the therapeutic compounds and methods described herein without such additional domains. In another embodiment an IIC binding/modulating moiety comprises an IL-2 mutein, or active fragment thereof, coupled, e.g., fused, to another polypeptide, e.g., a polypeptide that extends in vivo half-life, e.g., an immunoglobulin constant region, or a multimer or dimer thereof, e.g., AMG 592. In an embodiment the therapeutic compound comprises the IL-2 portion of AMG 592. In an embodiment the therapeutic compound comprises the IL-2 portion but not the immunoglobulin portion of AMG 592. In some embodiments, the mutein does not comprise a Fc region. For some IL-2 muteins, the muteins are engineered to contain a Fc region because such region has been shown to increase the half-life of the mutein. In some embodiments, the extended half-life is not necessary for the methods described and embodied herein. In some embodiments, the Fc region that is fused with the IL-2 mutein comprises a N297 mutations, such as, but not limited to, N297A. In some embodiments, the Fc region that is fused with the IL-2 mutein does not comprise a N297 mutation, such as, but not limited to, N297A.

[0162] IL-2 mutein molecules that preferentially expand or stimulate Treg cells (over cytotoxic T cells) can be used as an IIC binding/modulating moiety. In some embodiments, the IL-2 mutein can be linked to a PD-1 agonist antibody as provided for herein. Although such molecule may not be targeted to a specific tissue, it could be used to systemically regulate the immune system by targeting both the PD-1 pathway and the IL-2 pathway.

[0163] In some embodiments, IIC binding/modulating moiety comprises an IL-2 mutein molecule. As used herein, the term “IL-2 mutein molecule” or “IL-2 mutein” refers to an IL-2 variant that preferentially activates Treg cells. In some embodiments, either alone, or as a component of a therapeutic compound, an IL-2 mutein molecule activates Tregs at least 2, 5, 10, or 100 fold more than cytotoxic T cells. A suitable assay for evaluating preferential activation of Treg cells can be found in U.S. Pat. No. 9,580,486 at, for example, Examples 2 and 3, or in WO2016014428 at, for example, Examples 3, 4, and 5, each of which is incorporated by reference in its entirety. The sequence of mature IL-2 is

(SEQ ID NO: 6)
APTSSSTKKTQLQLEHLLLDLQMILNGINNYKNPKLTRMLTF
KFYMPKKATELKHLQCLEEELKPLEEVLNLAQSKNFHLRPRD
LISNINVIVLELKGSETTFMCEYADETATIVEFLNRWITFCQ
SIISTLT (mature IL-2 sequence)

[0164] The immature sequence of IL-2 can be represented by

(SEQ ID NO: 15)
MYRMQLLSCIALSLALVTNSAPTSSSTKKTQLQLEHLLLDLQ
MILNGINNYKNPKLTRMLTFKFYMPKKATELKHLQCLEEELK
PLEEVLNLAQSKNFHLRPRDLISNINVIVLELKGSETTEMCE
YADETATIVEFLNRWITFCQSIISTLT.

[0165] In some embodiments, an IIC binding/modulating moiety comprises an IL-2 mutein, or active fragment thereof, coupled, e.g., fused, to another polypeptide, e.g., a polypeptide that extends in vivo half-life, e.g., an immunoglobulin constant region, or a multimer or dimer thereof.

[0166] An IL-2 mutein molecule can be prepared by mutating one or more of the residues of IL-2. Non-limiting examples of IL-2-muteins can be found in WO2016/164937, U.S. Pat. Nos. 9,580,486, 7,105,653, 9,616,105, 9,428,567, US2017/0051029, US2014/0286898A1, WO2014153111A2, WO2010/085495, WO2016014428A2, WO2016025385A1, and US20060269515, each of which are incorporated by reference in its entirety.

[0167] In some embodiments, the alanine at position 1 of the sequence above is deleted. In some embodiments, the IL-2 mutein molecule comprises a serine substituted for cysteine at position 125 of the mature IL-2 sequence. Other combinations of mutations and substitutions that are IL-2 mutein molecules are described in US20060269515, which is incorporated by reference in its entirety. In some embodiments, the cysteine at position 125 is also substituted with a valine or alanine. In some embodiments, the IL-2 mutein molecule comprises a V91K substitution. In some embodiments, the IL-2 mutein molecule comprises a N88D substitution. In some embodiments, the IL-2 mutein molecule comprises a N88R substitution. In some embodiments, the IL-2 mutein molecule comprises a substitution of H16E, D84K, V91N, N88D, V91K, or V91R, any combinations thereof. In some embodiments, these IL-2 mutein molecules also comprise a substitution at position 125 as described herein. In some embodiments, the IL-2 mutein molecule comprises one or more substitutions selected from the group consisting of. T3N, T3A, L12G, L12K, L12Q, L12S, Q13G, E15A, E15G, E15S, H16A, H16D, H16G, H16K, H16M, H16N, H16R, H16S, H16T, H16V, H16Y, L19A, L19D, L19E, L19G, L19N, L19R, L19S, L19T, L19V, D20A, D20E, D20H, D20I, D20Y, D20F, D20G, D20T, D20W, M23R, R81A, R81G, R81S, R81T, D84A, D84E, D84G, D84I, D84M, D84Q D84R, D84S, D84T, S87R, N88A, N88D, N88E, N88I, N88F, N88G, N88M, N88R, N88S, N88V, N88W, V91D, V91E, V91G, V91S, I92K, I92R, E95G, and Q126. In some embodiments, the amino acid sequence of the IL-2 mutein molecule differs from the amino acid sequence set forth in mature IL-2 sequence with a C125A or C125S substitution and with one substitution selected from T3N, T3A, L12G, L12K, L12Q L12S, Q13G, E15A, E15G, E15S, H16A, H16D, H16G, H16K, H16M, H16N, H16R, H16S, H16T, H16V, H16Y, L19A, L19D, L19E, L19G, L19N, L19R, L19S, L19T, L19V, D20A, D20E, D20F, D20G, D20T, D20W, M23R, R81A, R81G, R81S, R81T, D84A, D84E, D84G, D84I, D84M, D84Q, D84R, D84S, D84T, S87R, N88A, N88D, N88E, N88F, N88I, N88G, N88M, N88R, N88S, N88V, N88W, V91D, V91E, V91G, V91S, I92K, I92R, E95G, Q126I, Q126L, and Q126F. In some embodiments, the IL-2 mutein molecule differs from the amino acid sequence set forth in mature IL-2 sequence with a C125A or C125S substitution and with one substitution selected from D20H, D20I, D20Y, D20E, D20G, D20W, D84A, D84S, H16D, H16G, H16K, H16R, H16T, H16V, I92K, I92R, L12K, L19D, L19N, L19T, N88D, N88R, N88S, V91D, V91G, V91K, and V91S. In some embodiments, the IL-2 mutein comprises N88R and/or D20H mutations.

[0168] In some embodiments, the IL-2 mutein molecule comprises a mutation in the polypeptide sequence at a position selected from the group consisting of amino acid 30, amino acid 31, amino acid 35, amino acid 69, and amino acid 74. In some embodiments, the mutation at position 30 is N30S. In some embodiments, the mutation at position 31 is Y31H. In some embodiments, the mutation at position 35 is K35R. In some embodiments, the mutation at position 69 is V69A. In some embodiments, the mutation at position 74 is Q74P. In some embodiments, the mutein comprises a V69A mutation, a Q74P mutation, a N88D or N88R mutation, and one or more of L53I, L56I, L80I, or L118I mutations. In some embodiments, the mutein comprises a V69A mutation, a Q74P mutation, a N88D or N88R mutation, and a L to I mutation selected from the group consisting of: L53I, L56I, L80I, and L118I mutation. In some embodiments, the IL-2 mutein comprises a V69A, a Q74P, a N88D or N88R mutation, and a L53I mutation. In some embodiments, the IL-2 mutein comprises a V69A, a Q74P, a N88D or N88R mutation, and a L56I mutation. In some embodiments, the IL-2 mutein comprises a V69A, a Q74P, a N88D or N88R mutation, and a L80I mutation. In some embodiments, the IL-2 mutein comprises a V69A, a Q74P, a N88D or N88R mutation, and a L118I mutation. As provided for herein, the muteins can also comprise a C125A or C125S mutation.

[0169] In some embodiments, the mutein comprises a T3A mutation. The full length IL-2 muteins provided herein may not be illustrated with a T3A or other mutations provided for herein, but such mutations can be added into the muteins provided herein as is the case for any of the other mutations illustrated herein. Accordingly, In some embodiments, the mutein comprises a T3N mutation. In some embodiments, the mutein comprises a T3A mutation. In some embodiments, the mutein comprises a L12G mutation. In some embodiments, the mutein comprises a L12K mutation. In some embodiments, the mutein comprises a L12Q mutation. In some embodiments, the mutein comprises a L12S mutation. In some embodiments, the mutein comprises a Q13G mutation. In some embodiments, the mutein comprises a E15A mutation. In some embodiments, the mutein comprises a E15G mutation. In some embodiments, the mutein comprises a E15S mutation. In some embodiments, the mutein comprises a H16A mutation. In some embodiments, the mutein comprises a H16D mutation. In some embodiments, the mutein comprises a H16G mutation. In some embodiments, the mutein comprises a H16K mutation. In some embodiments, the mutein comprises a H16M mutation. In some embodiments, the mutein comprises a H16N mutation. In some embodiments, the mutein comprises a H16R mutation. In some embodiments, the mutein comprises a H16S mutation. In some embodiments, the mutein comprises a H16T mutation. In some embodiments, the mutein comprises a HT6V mutation. In some embodiments, the mutein comprises a H16Y mutation. In some embodiments, the mutein comprises a L19A mutation. In some embodiments, the mutein comprises a L19D mutation. In some embodiments, the mutein comprises a L19E mutation. In some embodiments, the mutein comprises a L19G mutation. In some embodiments, the mutein comprises a L19N mutation. In some embodiments, the mutein comprises a L19R mutation. In some embodiments, the mutein comprises a L19S mutation. In some embodiments, the mutein comprises a L19T mutation. In some embodiments, the mutein comprises a L19V mutation. In some embodiments, the mutein comprises a D20A mutation. In some embodiments, the mutein comprises a D20E mutation. In some embodiments, the mutein comprises a D20H mutation. In some embodiments, the mutein comprises a D20I mutation. In some embodiments, the mutein comprises a D20Y mutation. In some embodiments, the mutein comprises a D20F mutation. In some embodiments, the mutein comprises a D20G mutation. In some embodiments, the mutein comprises a D20T mutation. In some embodiments, the mutein comprises a D20W mutation. In some embodiments, the mutein comprises a M23R mutation. In some embodiments, the mutein comprises a R81A mutation. In some embodiments, the mutein comprises a R81G mutation. In some embodiments, the mutein comprises a R81S mutation. In some embodiments, the mutein comprises a R81T mutation. In some embodiments, the mutein comprises a D84A mutation. In some embodiments, the mutein comprises a D84E mutation. In some embodiments, the mutein comprises a D84G mutation. In some embodiments, the mutein comprises a D84I mutation. In some embodiments, the mutein comprises a D84M mutation. In some embodiments, the mutein comprises a D84Q mutation. In some embodiments, the mutein comprises a D84R mutation. In some embodiments, the mutein comprises a D84S mutation. In some embodiments, the mutein comprises a D84T mutation. In some embodiments, the mutein comprises a S87R mutation. In some embodiments, the mutein comprises a N88A mutation. In some embodiments, the mutein comprises a N88D mutation. In some embodiments, the mutein comprises a N88E mutation. In some embodiments, the mutein comprises a N88I mutation. In some embodiments, the mutein comprises a N88F mutation. In some embodiments, the mutein comprises a N88G mutation. In some embodiments, the mutein comprises a N88M mutation. In some embodiments, the mutein comprises a N88R mutation. In some embodiments, the mutein comprises a N88S mutation. In some embodiments, the mutein comprises a N88V mutation. In some embodiments, the mutein comprises a N88W mutation. In some embodiments, the mutein comprises a V91D mutation. In some embodiments, the mutein comprises a V91E mutation. In some embodiments, the mutein comprises a V91G mutation. In some embodiments, the mutein comprises a V91S mutation. In some embodiments, the mutein comprises a I92K mutation. In some embodiments, the mutein comprises a I92R mutation. In some embodiments, the mutein comprises a E95G mutation. In some embodiments, the mutein comprises a Q126 mutation.

[0170] Although the mutations are illustrated in list form, this is simply for convenience and the muteins may have one or more of the substitutions provided herein.

[0171] In some embodiments, the IL-2 mutein molecule comprises a substitution selected from the group consisting of: N88R, N88I, N88G, D20H, D109C, Q126L, Q126F, D84G, or D84I relative to mature human IL-2 sequence provided above. In some embodiments, the IL-2 mutein molecule comprises a substitution of D109C and one or both of a N88R substitution and a C125S substitution. In some embodiments, the cysteine that is in the IL-2 mutein molecule at position 109 is linked to a polyethylene glycol moiety, wherein the polyethylene glycol moiety has a molecular weight of between 5 and 40 kDa.

[0172] In some embodiments, any of the substitutions described herein are combined with a substitution at position 125. The substitution can be a C125S, C125A, or C125V substitution.

[0173] In addition to the substitutions or mutations described herein, in some embodiments, the IL-2 mutein has a substitution/mutation at one or more of positions 73, 76, 100, or 138 that correspond to SEQ ID NO: 15 or positions at one or more of positions 53, 56, 80, or 118 that correspond to SEQ ID NO: 6. In some embodiments, the IL-2 mutein comprises a mutation at positions 73 and 76; 73 and 100; 73 and 138; 76 and 100; 76 and 138; 100 and 138; 73, 76, and 100; 73, 76, and 138; 73, 100, and 138; 76, 100 and 138; or at each of 73, 76, 100, and 138 that correspond to SEQ ID NO: 15. In some embodiments, the IL-2 mutein comprises a mutation at positions 53 and 56; 53 and 80; 53 and 118; 56 and 80; 56 and 118; 80 and 118; 53, 56, and 80; 53, 56, and 118; 53, 80, and 118; 56, 80 and 118; or at each of 53, 56, 80, and 118 that correspond to SEQ ID NO: 6. As the IL-2 can be fused or tethered to other proteins, as used herein, the term corresponds to as reference to a SEQ ID NOs: 6 or 15 refer to how the sequences would align with default settings for alignment software, such as can be used with the NCBI website. In some embodiments, the mutation is leucine to isoleucine. Thus, the IL-2 mutein can comprise one more isoleucines at positions 73, 76, 100, or 138 that correspond to SEQ ID NO: 15 or positions at one or more of positions 53, 56, 80, or 118 that correspond to SEQ ID NO: 6. In some embodiments, the mutein comprises a mutation at L53 that correspond to SEQ ID NO: 6. In some embodiments, the mutein comprises a mutation at L56 that correspond to SEQ ID NO: 6. In some embodiments, the mutein comprises a mutation at L80 that correspond to SEQ ID NO: 6. In some embodiments, the mutein comprises a mutation at L118 that correspond to SEQ ID NO: 6. In some embodiments, the mutation is leucine to isoleucine. In some embodiments, the mutein also comprises a mutation as position 69, 74, 88, 125, or any combination thereof in these muteins that correspond to SEQ ID NO: 6. In some embodiments, the mutation is a V69A mutation. In some embodiments, the mutation is a Q74P mutation. In some embodiments, the mutation is a N88D or N88R mutation. In some embodiments, the mutation is a C125A or C125S mutation.

[0174] In some embodiments, the IL-2 mutein comprises a mutation at one or more of positions 49, 51, 55, 57, 68, 89, 91, 94, 108, and 145 that correspond to SEQ ID NO: 15 or one or more positions 29, 31, 35, 37, 48, 69, 71, 74, 88, and 125 that correspond to SEQ ID NO: 6. The substitutions can be used alone or in combination with one another. In some embodiments, the IL-2 mutein comprises substitutions at 2, 3, 4, 5, 6, 7, 8, 9, or each of positions 49, 51, 55, 57, 68, 89, 91, 94, 108, and 145. Non-limiting examples such combinations include, but are not limited to, a mutation at positions 49, 51, 55, 57, 68, 89, 91, 94, 108, and 145; 49, 51, 55, 57, 68, 89, 91, 94, and 108; 49, 51, 55, 57, 68, 89, 91, and 94; 49, 51, 55, 57, 68, 89, and 91; 49, 51, 55, 57, 68, and 89; 49, 51, 55, 57, and 68; 49, 51, 55, and 57; 49, 51, and 55; 49 and 51; 51, 55, 57, 68, 89, 91, 94, 108, and 145; 51, 55, 57, 68, 89, 91, 94, and 108; 51, 55, 57, 68, 89, 91, and 94; 51, 55, 57, 68, 89, and 91; 51, 55, 57, 68, and 89; 55, 57, and 68; 55 and 57; 55, 57, 68, 89, 91, 94, 108, and 145; 55, 57, 68, 89, 91, 94, and 108; 55, 57, 68, 89, 91, and 94; 55, 57, 68, 89, 91, and 94; 55, 57, 68, 89, and 91; 55, 57, 68, and 89; 55, 57, and 68; 55 and 57; 57, 68, 89, 91, 94, 108, and 145; 57, 68, 89, 91, 94, and 108; 57, 68, 89, 91, and 94; 57, 68, 89, and 91; 57, 68, and 89; 57 and 68; 68, 89, 91, 94, 108, and 145; 68, 89, 91, 94, and 108; 68, 89, 91, and 94; 68, 89, and 91; 68 and 89; 89, 91, 94, 108, and 145; 89, 91, 94, and 108; 89, 91, and 94; 89 and 91; 91, 94, 108, and 145; 91, 94, and 108; 91, and 94; or 94 and 108. Each mutation can be combined with one another. The same substitutions can be made in SEQ ID NO: 6, but the numbering would adjust appropriately as is clear from the present disclosure (20 less than the numbering for SEQ ID NO: 15 corresponds to the positions in SEQ ID NO: 6).

[0175] In some embodiments, the IL-2 mutein comprises a mutation at one or more positions of 35, 36, 42, 104, 115, or 146 that correspond to SEQ ID NO: 15 or the equivalent positions at SEQ ID NO: 6 (e.g. positions 15, 16, 22, 84, 95, or 126). These mutations can be combined with the other leucine to isoleucine mutations described herein or the mutation at positions 73, 76, 100, or 138 that correspond to SEQ ID NO: 15 or at one or more of positions 53, 56, 80, or 118 that correspond to SEQ ID NO: 6. In some embodiments, the mutation is a E35Q, H36N, Q42E, D104N, E115Q, or Q146E, or any combination thereof. In some embodiments, one or more of these substitutions is wild type. In some embodiments, the mutein comprises a wild-type residue at one or more of positions 35, 36, 42, 104, 115, or 146 that correspond to SEQ ID NO: 15 or the equivalent positions at SEQ ID NO: 6 (e.g. positions 15, 16, 22, 84, 95, and 126).

[0176] The mutations at these positions can be combined with any of the other mutations described herein, including, but not limited to substitutions at positions 73, 76, 100, or 138 that correspond to SEQ ID NO: 15 or positions at one or more of positions 53, 56, 80, or 118 that correspond to SEQ ID NO: 6 described herein and above. In some embodiments, the IL-2 mutein comprises a N49S mutation that corresponds to SEQ ID NO: 15. In some embodiments, the IL-2 mutein comprises a Y51S or a Y51H mutation that corresponds to SEQ ID NO: 15. In some embodiments, the IL-2 mutein comprises a K55R mutation that corresponds to SEQ ID NO: 15. In some embodiments, the IL-2 mutein comprises a T57A mutation that corresponds to SEQ ID NO: 15. In some embodiments, the IL-2 mutein comprises a K68E mutation that corresponds to SEQ ID NO: 15. In some embodiments, the IL-2 mutein comprises a V89A mutation that corresponds to SEQ ID NO: 15. In some embodiments, the IL-2 mutein comprises a N91R mutation that corresponds to SEQ ID NO: 15. In some embodiments, the IL-2 mutein comprises a Q94P mutation that corresponds to SEQ ID NO: 15. In some embodiments, the IL-2 mutein comprises a N108D or a N108R mutation that corresponds to SEQ ID NO: 15. In some embodiments, the IL-2 mutein comprises a C145A or C145S mutation that corresponds to SEQ ID NO: 15. These substitutions can be used alone or in combination with one another. In some embodiments, the mutein comprises each of these substitutions. In some embodiments, the mutein comprises 1, 2, 3, 4, 5, 6, 7, or 8 of these mutations. In some embodiments, the mutein comprises a wild-type residue at one or more of positions 35, 36, 42, 104, 115, or 146 that correspond to SEQ ID NO: 15 or the equivalent positions at SEQ ID NO: 6 (e.g. positions 15, 16, 22, 84, 95, and 126).

[0177] In some embodiments, the IL-2 mutein comprises a N29S mutation that corresponds to SEQ ID NO: 6. In some embodiments, the IL-2 mutein comprises a Y31S or a Y31H mutation that corresponds to SEQ ID NO: 6. In some embodiments, the IL-2 mutein comprises a K35R mutation that corresponds to SEQ ID NO: 6. In some embodiments, the IL-2 mutein comprises a T37A mutation that corresponds to SEQ ID NO: 6. In some embodiments, the IL-2 mutein comprises a K48E mutation that corresponds to SEQ ID NO: 6. In some embodiments, the IL-2 mutein comprises a V69A mutation that corresponds to SEQ ID NO: 6. In some embodiments, the IL-2 mutein comprises a N71R mutation that corresponds to SEQ ID NO: 6. In some embodiments, the IL-2 mutein comprises a Q74P mutation that corresponds to SEQ ID NO: 6. In some embodiments, the IL-2 mutein comprises a N88D or a N88R mutation that corresponds to SEQ ID NO: 6. In some embodiments, the IL-2 mutein comprises a C125A or C125S mutation that corresponds to SEQ ID NO: 6. These substitutions can be used alone or in combination with one another. In some embodiments, the mutein comprises 1, 2, 3, 4, 5, 6, 7, or 8 of these mutations. In some embodiments, the mutein comprises each of these substitutions. In some embodiments, the mutein comprises a wild-type residue at one or more of positions 35, 36, 42, 104, 115, or 146 that correspond to SEQ ID NO: 15 or the equivalent positions at SEQ ID NO: 6 (e.g. positions 15, 16, 22, 84, 95, and 126).

[0178] For any of the IL-2 muteins described herein, in some embodiments, one or more of positions 35, 36, 42, 104, 115, or 146 that correspond to SEQ ID NO: 15 or the equivalent positions at SEQ ID NO: 6 (e.g. positions 15, 16, 22, 84, 95, or 126) are wild-type (e.g. are as shown in SEQ ID NOs: 6 or 15). In some embodiments, 2, 3, 4, 5, 6, or each of positions 35, 36, 42, 104, 115, or 146 that correspond to SEQ ID NO: 15 or the equivalent positions at SEQ ID NO: 6 (e.g. positions 15, 16, 22, 84, 95, and 126) are wild-type.

[0179] In some embodiments, the IL-2 mutein comprises a sequence of:

(SEQ ID NO: 16)
MYRMQLLSCIALSLALVTNSAPTSSSTKKTQLQLEHLLLDLQ
MILNGISNHKNPRLARMLTFKFYMPEKATEIKHLQCLEEELK
PLEEALRLAPSKNFHLRPRDLISDINVIVLELKGSETTEMCE
YADETATIVEFLNRWITFSQSIISTLT.

[0180] In some embodiments, the IL-2 mutein comprises a sequence of:

(SEQ ID NO: 17)
MYRMQLLSCIALSLALVINSAPTSSSTKKTQLQLEHLLLDLQ
MILNGISNHKNPRLARMLTFKFYMPEKATELKHIQCLEEELK
PLEEALRLAPSKNFHLRPRDLISDINVIVLELKGSETTEMCE
YADETATIVEFLNRWITFSQSIISTLT.

[0181] In some embodiments, the IL-2 mutein comprises a sequence of:

(SEQ ID NO: 18)
MYRMQLLSCIALSLALVTNSAPTSSSTKKTQLQLEHLLLDLQMILNGISN
HKNPRLARMLTFKFYMPEKATELKHLQCLEEELKPLEEALRLAPSKNFHI
RPRDLISDINVIVLELKGSETTEMCEYADETATIVEFLNRWITFSQSIIS
TLT.

[0182] In some embodiments, the IL-2 mutein comprises a sequence of:

(SEQ ID NO: 19)
MYRMQLLSCIALSLALVINSAPTSSSTKKTQLQLEHLLLDLQMILNGISN
HKNPRLARMLTFKFYMPEKATELKHLQCLEEELKPLEEALRLAPSKNFHL
RPRDLISDINVIVLELKGSETTEMCEYADETATIVEFINRWITFSQSIIS
TLT.

[0183] In some embodiments, the IL-2 mutein sequences described herein do not comprise the IL-2 leader sequence. The IL-2 leader sequence can be represented by the sequence of MYRMQLLSCIALSLALVTNS (SEQ ID NO: 20). Therefore, in some embodiments, the sequences illustrated above can also encompass peptides without the leader sequence. Although SEQ ID NOs; 16-20 are illustrated with only mutation at one of positions 73, 76, 100, or 138 that correspond to SEQ ID NO: 15 or positions at one or more of positions 53, 56, 80, or 118 that correspond to SEQ ID NO: 6, the peptides can comprise one, two, three or 4 of the mutations at these positions. In some embodiments, the substitution at each position is isoleucine or other type of conservative amino acid substitution. In some embodiments, the leucine at the recited positions are substituted with, independently, isoleucine, valine, methionine, or phenylalanine.

[0184] In some embodiments, the IL-2 mutein molecule is fused to a Fc Region or other linker region as described herein. Examples of such fusion proteins can be found in U.S. Pat. Nos. 9,580,486, 7,105,653, 9,616,105, 9,428,567, US2017/0051029, WO2016/164937, US2014/0286898A1, WO2014153111A2, WO2010/085495, WO2016014428A2, WO2016025385A1, US2017/0037102, and US2006/0269515, each of which are incorporated by reference in its entirety.

[0185] In some embodiments, the Fc Region comprises what is known as the LALA mutation. Using the Kabat numbering of the Fc region, this would correspond to L247A, L248A, and G250A. In some embodiments, using the EU numbering of the Fc region, the Fc region comprises a L234A mutation, a L235A mutation, and/or a G237A mutation. Regardless of the numbering system used, in some embodiments, the Fc portion can comprise mutations that correspond to these residues. In some embodiments, the Fc Region comprises N297G or N297A (kabat numbering) mutations. The Kabat numbering is based upon a full-length sequence, but would be used in a fragment based upon a traditional alignment used by one of skill in the art for the Fc region.

[0186] In some embodiments, the Fc Region comprises a sequence of:

(SEQ ID NO: 21)
DKTHTCPPCPAPEAAGAPSVELFPPKPKDTLMISRTPEVTCVVVDVSHED
PEVKFNWYVDGVEVHNAKTKPREEQYNSTYRVVSVLTVLHQDWLNGKEYK
CKVSNKALPAPIEKTISKAKGQPREPQVYTLPPSREEMTKNQVSLTCLVK
GFYPSDIAVEWESNGQPENNYKTTPPVLDSDGSFFLYSKLTVDKSRWQQG
NVFSCSVMHEALHNHYTQKSLSLSPG.
or
(SEQ ID NO: 28)
DKTHTCPPCPAPELLGGPSVFLFPPKPKDTLMISRTPEVTCVVVDVSHED
PEVKENWYVDGVEVHNAKTKPREEQYNSTYRVVSVLTVLHQDWLNGKEYK
CKVSNKALPAPIEKTISKAKGQPREPQVYTLPPSREEMTKNQVSLTCLVK
GFYPSDIAVEWESNGQPENNYKTTPPVLDSDGSFFLYSKLTVDKSRWQQG
NVFSCSVMHEALHNHYTQKSLSLSPG.

[0187] In some embodiments, the IL-2 mutein is linked to the Fc Region. Non-limiting examples of linkers are glycine/serine linkers. For example, a glycine/serine linkers can be a sequence of GGGGSGGGGSGGGGSGGGGS (SEQ ID NO: 22) or GGGGSGGGGSGGGGS (SEQ ID NO: 30). This is simply a non-limiting example and the linker can have varying number of GGGGS (SEQ ID NO: 23) or GGGGA repeats (SEQ ID NO: 29). In some embodiments, the linker comprises 1, 2, 3, 4, 5, 6, 7, 8, 9, or 10 of the GGGGS (SEQ ID NO: 23) or GGGGA repeats (SEQ ID NO: 29) repeats (repeats disclosed as SEQ ID NOs: 1750 and 1748, respectively, in order of appearance). In some embodiments, the linker is 10 amino acids in length. In some embodiments, the linker is 5 amino acids in length. In some embodiments, the linker is 15 amino acids in length. In some embodiments, the linker is 20 amino acids in length. In some embodiments, the linker is 25 amino acids in length. In some embodiments, the linker is 30 amino acids in length. In some embodiments, the linker is 35 amino acids in length. In some embodiments, the linker is from 5-50 amino acids in length.

[0188] Thus, the IL-2/Fc Fusion can be represented by the formula of Z_{IL-2M}-L_{gs}-Z_{Fe}, wherein Z_{IL-2M} is an IL-2 mutein as described herein, L_{gs} is a linker sequence as described herein (e.g. glycine/serine linker) and Z_{Fe} is a Fc region described herein or known to one of skill in the art. In some embodiments, the formula can be in the reverse orientation Z_{Fe}-L_{gs}-Z_{IL-2M}.

[0189] In some embodiments, the IL-2/Fc fusion comprises a sequence of

(SEQ ID NO: 24)
MYRMQLLSCIALSLALVTNSAPTSSSTKKTQLQLEHLLLDLQMILNGISN
HKNPRLARMLTFKFYMPEKATEIKHLQCLEEELKPLEEALRLAPSKNFHL
RPRDLISDINVIVLELKGSETTEMCEYADETATIVEFLNRWITESQSIIS
TLTGGGGSGGGGSGGGGSGGGGSDKTHTCPPCPAPEAAGAPSVELFPPKP
KDTLMISRTPEVTCVVVDVSHEDPEVKENWYVDGVEVHNAKTKPREEQYN
STYRVVSVLTVLHQDWLNGKEYKCKVSNKALPAPIEKTISKAKGQPREPQ
VYTLPPSREEMTKNQVSLTCLVKGFYPSDIAVEWESNGQPENNYKTTPPV
LDSDGSFFLYSKLTVDKSRWQQGNVESCSVMHEALHNHYTQKSLSLSPG;
(SEQ ID NO: 25)
MYRMQLLSCIALSLALVTNSAPTSSSTKKTQLQLEHLLLDLQMILNGISN
HKNPRLARMLTFKFYMPEKATELKHIQCLEEELKPLEEALRLAPSKNFHL
RPRDLISDINVIVLELKGSETTEMCEYADETATIVEFLNRWITFSQSIIS
TLTGGGGSGGGGSGGGGSGGGGSDKTHTCPPCPAPEAAGAPSVELFPPKP
KDTLMISRTPEVTCVVVDVSHEDPEVKENWYVDGVEVHNAKTKPREEQYN
STYRVVSVLTVLHQDWLNGKEYKCKVSNKALPAPIEKTISKAKGQPREPQ
VYTLPPSREEMTKNQVSLTCLVKGFYPSDIAVEWESNGQPENNYKTTPPV
LDSDGSFFLYSKLTVDKSRWQQGNVFSCSVMHEALHNHYTQKSLSLSPG;
(SEQ ID NO: 26)
MYRMQLLSCIALSLALVINSAPTSSSTKKTQLQLEHLLLDLQMILNGISN
HKNPRLARMLTFKFYMPEKATELKHLQCLEEELKPLEEALRLAPSKNFHI
RPRDLISDINVIVLELKGSETTEMCEYADETATIVEFLNRWITFSQSIIS
TLTGGGGSGGGGSGGGGSGGGGSDKTHTCPPCPAPEAAGAPSVELFPPKP
KDTLMISRTPEVTCVVVDVSHEDPEVKENWYVDGVEVHNAKTKPREEQYN
STYRVVSVLTVLHQDWLNGKEYKCKVSNKALPAPIEKTISKAKGQPREPQ
VYTLPPSREEMTKNQVSLTCLVKGFYPSDIAVEWESNGQPENNYKTTPPV
LDSDGSFFLYSKLTVDKSRWQQGNVFSCSVMHEALHNHYTQKSLSLSPG;
or
(SEQ ID NO: 27)
MYRMQLLSCIALSLALVTNSAPTSSSTKKTQLQLEHLLLDLQMILNGISN
HKNPRLARMLTFKFYMPEKATELKHLQCLEEELKPLEEALRLAPSKNFHL
RPRDLISDINVIVLELKGSETTEMCEYADETATIVEFINRWITFSQSIIS
TLTGGGGSGGGGSGGGGSGGGGSDKTHTCPPCPAPEAAGAPSVELFPPKP
KDTLMISRTPEVTCVVVDVSHEDPEVKENWYVDGVEVHNAKTKPREEQYN
STYRVVSVLTVLHQDWLNGKEYKCKVSNKALPAPIEKTISKAKGQPREPQ
VYTLPPSREEMTKNQVSLTCLVKGFYPSDIAVEWESNGQPENNYKTTPPV
LDSDGSFFLYSKLTVDKSRWQQGNVESCSVMHEALHNHYTQKSLSLSPG.

[0190] In some embodiments, the IL-2/Fc Fusion comprises a sequence selected from the following table, Table 3:

TABLE 3
IL-2/Fc Fusion Protein Amino Acid Sequences

| Sequence | |
|---|---|
| Identification | Sequence |
| SEQ ID NO: 7 | APTSSSTKKTQLQLEHLLLDLQMILNGINNYKNPKLTRMLTFKFYMPKKATELKHLQCLEE |
| | ELKPLEEVLNLAQSKNFHLRPRDLISRINVIVLELKGSETTEMCEYADETATIVEFLNRWI |
| | TFSQSIISTLTGGGGAGGGGDKTHTCPPCPAPELLGGPSVFLFPPKPKDTLMISRTPEVTC |
| | VVVDVSHEDPEVKFNWYVDGVEVHNAKTKPREEQYASTYRVVSVLTVLHQDWLNGKEYKCK |
| | VSNKALPAPIEKTISKAKGQPREPQVYTLPPSRDELTKNQVSLTCLVKGFYPSDIAVEWES |
| | NGQPENNYKTTPPVLDSDGSFFLYSKLTVDKSRWQQGNVFSCSVMHEALHNHYTQKSLSLS |
| | PGK |
| SEQ ID NO: 8 | APTSSSTKKTQLQLEHLLLHLQMILNGINNYKNPKLTRMLTFKFYMPKKATELKHLQCLEE |
| | ELKPLEEVLNLAQSKNFHLRPRDLISNINVIVLELKGSETTEMCEYADETATIVEFLNRWI |
| | TFSQSIISTLTVECPPCPAPPVAGPSVFLFPPKPKDTLMISRTPEVTCVVVDVSHEDPEVQ |
| | FNWYVDGVEVHNAKTKPREEQFNSTFRVVSVLTVVHQDWLNGKEYKCKVSNKGLPAPIEKT |
| | ISKTKGQPREPQVYTLPPSREEMTKNQVSLTCLVKGFYPSDIAVEWESNGQPENNYKTTPP |
| | MLDSDGSFFLYSKLTVDKSRWQQGNVFSCSVMHEALHNHYTQKSLSLSPGK |
| SEQ ID NO: 9 | APTSSSTKKTQLQLEHLLLDLQMILNGINNYKNPKLTRMLTFKFYMPKKATELKHLQCLEE |
| | ELKPLEEVLNLAQSKNFHLRPRDLISRINVIVLELKGSETTEMCEYADETATIVEFLNRWI |
| | TFSQSIISTLTDKTHTCPPCPAPELLGGPSVFLFPPKPKDTLMISRTPEVTCVVVDVSHED |
| | PEVKFNWYVDGVEVHNAKTKPREEQYASTYRVVSVLTVLHQDWLNGKEYKCKVSNKALPAP |
| | IEKTISKAKGQPREPQVYTLPPSRDELTKNQVSLTCLVKGFYPSDIAVEWESNGQPENNYK |
| | TTPPVLDSDGSFFLYSKLTVDKSRWQQGNVFSCSVMHEALHNHYTQKSLSLSPG |
| SEQ ID NO: 10 | APTSSSTKKTQLQLEHLLLDLQMILNGINNYKNPKLTRMLTFKFYMPKKATELKHLQCLEE |
| | ELKPLEEVLNLAQSKNFHLRPRDLISRINVIVLELKGSETTEMCEYADETATIVEFLNRWI |
| | TFSQSIISTLTGGGGSDKTHTCPPCPAPELLGGPSVELFPPKPKDTLMISRTPEVTCVVVD |
| | VSHEDPEVKENWYVDGVEVHNAKTKPREEQYASTYRVVSVLTVLHQDWLNGKEYKCKVSNK |
| | ALPAPIEKTISKAKGQPREPQVYTLPPSRDELTKNQVSLTCLVKGFYPSDIAVEWESNGQP |
| | ENNYKTTPPVLDSDGSFFLYSKLTVDKSRWQQGNVFSCSVMHEALHNHYTQKSLSLSPG |
| SEQ ID NO: 11 | APTSSSTKKTQLQLEHLLLDLQMILNGINNYKNPKLTRMLTFKFYMPKKATELKHLQCLEE |
| | ELKPLEEVLNLAQSKNFHLRPRDLISRINVIVLELKGSETTEMCEYADETATIVEFLNRWI |
| | TFSQSIISTLTGGGGSGGGGSDKTHTCPPCPAPELLGGPSVFLFPPKPKDTLMISRTPEVT |
| | CVVVDVSHEDPEVKENWYVDGVEVHNAKTKPREEQYASTYRVVSVLTVLHQDWLNGKEYKC |
| | KVSNKALPAPIEKTISKAKGQPREPQVYTLPPSRDELTKNQVSLTCLVKGFYPSDIAVEWE |
| | SNGQPENNYKTTPPVLDSDGSFFLYSKLTVDKSRWQQGNVFSCSVMHEALHNHYTQKSLSL |
| | SPG |
| SEQ ID NO: 12 | APTSSSTKKTQLQLEHLLLDLQMILNGINNYKNPKLTRMLTEKFYMPKKATELKHLQCLEE |
| | ELKPLEEVLNLAQSKNFHLRPRDLISRINVIVLELKGSETTEMCEYADETATIVEFLNRWI |
| | TFSQSIISTLTGGGGGGGGSGGGGSDKTHTCPPCPAPELLGGPSVFLFPPKPKDTLMISR |
| | TPEVTCVVVDVSHEDPEVKENWYVDGVEVHNAKTKPREEQYASTYRVVSVLTVLHQDWLNG |
| | KEYKCKVSNKALPAPIEKTISKAKGQPREPQVYTLPPSRDELTKNQVSLTCLVKGFYPSDI |
| | AVEWESNGQPENNYKTTPPVLDSDGSFFLYSKLTVDKSRWQQGNVESCSVMHEALHNYHTQ |
| | KSLSLSPG |
| SEQ ID NO: 13 | APTSSSTKKTQLQLEHLLLDLQMILNGINNYKNPKLTRMLTFKFYMPKKATELKHLQCLEE |
| | ELKPLEEVLNLAQSKNFHLRPRDLISRINVIVLELKGSETTEMCEYADETATIVEFLNRWI |
| | TFSQSIISTLTGGGGSGGGGSGGGGSGGGGSDKTHTCPPCPAPELLGGPSVFLFPPKPKDT |
| | LMISRTPEVTCVVVDVSHEDPEVKENWYVDGVEVHNAKTKPREEQYASTYRVVSVLTVLHQ |
| | DWLNGKEYKCKVSNKALPAPIEKTISKAKGQPREPQVYTLPPSRDELTKNQVSLTCLVKGE |
| | YPSDIAVEWESNGQPENNYKTTPPVLDSDGSFFLYSKLTVDKSRWQQGNVFSCSVMHEALH |
| | NHYTQKSLSLSPG |
| SEQ ID NO: 14 | APTSSSTKKTQLQLEHLLLHLQMILNGINNYKNPKLTRMLTFKFYMPKKATELKHLQCLEE |
| | ELKPLEEVLNLAQSKNFHLRPRDLISNINVIVLELKGSETTEMCEYADETATIVEFLNRWI |
| | TFSQSIISTLTGGGGSGGGGSGGGGSDKTHTCPPCPAPELLGGPSVFLFPPKPKDTLMISR |
| | TPEVTCVVVDVSHEDPEVKENWYVDGVEVHNAKTKPREEQYASTYPVVSVLTVLHQDWLNG |
| | KEYKCKVSNKALPAPIEKTISKAKGQPREPQVYTLPPSRDELTKNQVSLTCLVKGFYPSDI |
| | AVEWESNGQPENNYKTTPPVLDSDGSFFLYSKLTVDKSRWQQGNVFSCSVMHEALHNHYTQ |
| | KSLSLSPG |

[0191] In some embodiments, the IL-2 muteins comprises one or more of the sequences provided in the following table, which, in some embodiments, shows the IL-2 mutein fused with other proteins or linkers. The table also provides sequences for a variety of Fc domains or variants that the IL-2 can be fused with:

| SEQ ID | Brief | |
|---|---|---|
| NO: | Description | Amino Acid Sequence |
| 31 | Human IL-2 | APTSSSTKKTQLQLEHLLLDLQMILNGINNYKNPKLTRMLTFKFYMPKKA |
| | with C125S | TELKHLQCLEEELKPLEEVLNLAQSKNFHLRPRDLISNINVIVLELKGSE |
| | mutation | TTFMCEYADETATIVEFLNRWITFSQSIISTLT |
| 32 | Human IL-2 | APASSSTKKTQLQLEHLLLDLQMILNGINNYKNPKLTRMLTFKFYMPKKA |
| | with C125S | TELKHLQCLEEELKPLEEVLNLAQSKNFHLRPRDLISNINVIVLELKGSE |
| | and T3A | TTFMCEYADETATIVEFLNRWITFSQSIISTLT |
| | mutations | |
| 33 | Human IL-2 | APTSSSTKKTQLQLEHLLLDLQMILNGINNYKNPKLTRMLTFKFYMPKKA |
| | with N88R and | TELKHLQCLEEELKPLEEVLNLAQSKNFHLRPRDLISRINVIVLELKGSE |
| | C125S | TTFMCEYADETATIVEFLNRWITFSQSIISTLT |
| 34 | Human IL-2 | APTSSSTKKTQLQLEHLLLDLQMILNGINNYKNPKLTRMLTFKFYMPKKA |
| | with V69A, | TELKHLQCLEEELKPLEEALNLAPSKNFHLRPRDLISNINVIVLELKGSE |
| | Q74P and | TTFMCEYADETATIVEFLNRWITFSQSIISTLT |
| | C125S | |
| | mutations | |
| 35 | Human IL-2 | APTSSSTKKTQLQLEHLLLDLQMILNGINNYKNPKLTRMLTFKFYMPKKA |
| | with V69A, | TELKHLQCLEEELKPLEEALNLAPSKNFHLRPRDLISDINVIVLELKGSE |
| | Q74P, N88D | TTFMCEYADETATIVEFLNRWITESQSIISTLT |
| | and C125S | |
| | mutations | |
| 36 | Human IL-2 | APTSSSTKKTQLQLEHLLLDLQMILNGINNYKNPKLTRMLTFKFYMPKKA |
| | with V69A, | TELKHLQCLEEELKPLEEALNLAPSKNFHLRPRDLISRINVIVLELKGSE |
| | Q74P, N88R | TTFMCEYADETATIVEFLNRWITFSQSIISTLT |
| | and C125S | |
| | mutations | |
| 37 | Human IL-2 | APTSSSTKKTQLQLEHLLLDLQMILNGINNYKNPKLTRMLTFKFYMPKKA |
| | with N88D and | TELKHLQCLEEELKPLEEVLNLAQSKNFHLRPRDLISDINVIVLELKGSE |
| | C125S | TTFMCEYADETATIVEFLNRWITFSQSIISTLT |
| 38 | Human IL-2 | APTSSSTKKTQLQLEHLLLDLQMILNGINNYKNPKLTRMLTFKFYMPKKA |
| | with L53I, | TEIKHLQCLEEELKPLEEALNLAPSKNFHLRPRDLISDINVIVLELKGSE |
| | V69A, Q74?, | TTFMCEYADETATIVEFLNRWITFSQSIISTLT |
| | N88D and | |
| | C125S | |
| | mutations | |
| 39 | Human IL-2 | APTSSSTKKTQLQLEHLLLDLQMILNGINNYKNPKLTRMLTFKFYMPKKA |
| | with L56I, | TELKHIQCLEEELKPLEEALNLAPSKNFHLRPRDLISDINVIVLELKGSE |
| | V69A, Q74P, | TTFMCEYADETATIVEFLNRWITESQSIISTLT |
| | N88D and | |
| | C125S | |
| | mutations | |
| 40 | Human IL-2 | APTSSSTKKTQLQLEHLLLDLQMILNGINNYKNPKLTRMLTFKFYMPKKA |
| | with V69A, | TELKHLQCLEEELKPLEEALNLAPSKNFHIRPRDLISDINVIVLELKGSE |
| | Q74P, L80I, | TTFMCEYADETATIVEFLNRWITFSQSIISTLT |
| | N88D and | |
| | C125S | |
| | mutations | |
| 41 | Human IL-2 | APTSSSTKKTQLQLEHLLLDLQMILNGINNYKNPKLTRMLTFKFYMPKKA |
| | with V69A, | TELKHLQCLEEELKPLEEALNLAPSKNFHLRPRDLISDINVIVLELKGSE |
| | Q74P, N88D, | TTFMCEYADETATIVEFINRWITFSQSIISTLT |
| | L118I, and | |
| | C125S | |
| | mutations | |
| 21 | Human IgG1 Fc | DKTHTCPPCPAPEAAGAPSVELFPPKPKDTLMISRTPEVTCVVVDVSHED |
| | (N-terminal | PEVKFNWYVDGVEVHNAKTKPREEQYNSTYRVVSVLTVLHQDWLNGKEYK |
| | fusions) with | CKVSNKALPAPIEKTISKAKGQPREPQVYTLPPSREEMTKNQVSLTCLVK |
| | L234A, L235A, | GFYPSDIAVEWESNGQPENNYKTTPPVLDSDGSFFLYSKLTVDKSRWQQG |
| | and G237A | NVFSCSVMHEALHNHYTQKSLSLSPG |
| | mutations | |
| 30 | GGGGSGGGGSGGG | GGGGSGGGGSGGGGS |
| | GS linker (15 | |
| | amino acids) | |
| 22 | GGGGSGGGGSGGG | GGGGSGGGGSGGGGSGGGGS |
| | GSGGGGS | |
| | linker (20 | |
| | amino acids) | |
| 23 | GGGGS linker | GGGGS |
| | (5 amino | |
| | acids ) | |
| 43 | Human IgG1 Fc | DKTHTCPPCPAPELLGGPSVFLFPPKPKDTLMISRTPEVTCVVVDVSHED |
| | (truncated) | PEVKFNWYVDGVEVHNAKTKPREEQYGSTYRVVSVLTVLHQDWLNGKEYK |
| | with N297G | CKVSNKALPAPIEKTISKAKGQPREPQVYTLPPSREEMTKNQVSLTCLVK |
| | mutation | GFYPSDIAVEWESNGQPENNYKTTPPVLDSDGSFFLYSKLTVDKSRWQQG |
| | | NVFSCSVMHEALHNHYTQKSLSLSPG |
| 44 | Antibody | ASTKGPSVFPLAPSSKSTSGGTAALGCLVKDYFPEPVTVSWNSGALTSGV |
| | Heavy Chain | HTFPAVLQSSGLYSLSSVVTVPSSSLGTQTYICNVNHKPSNTKVDKKVEP |
| | CH1-CH2-CH3 | KSCDKTHTCPPCPAPEAAGAPSVELFPPKPKDTLMISRTPEVTCVVVDVS |
| | domains | HEDPEVKFNWYVDGVEVHNAKTKPREEQYNSTYRVVSVLTVLHQDWLNGK |
| | (human IgG1 | EYKCKVSNKALPAPIEKTISKAKGQPREPQVYTLPPSREEMTKNQVSLTC |
| | with L234A, | LVKGFYPSDIAVEWESNGQPENNYKTTPPVLDSDGSFFLYSKLTVDKSRW |
| | L235A, and | QQGNVFSCSVMHEALHNHYTQKSLSLSPG |
| | G237A) | |
| 45 | Antibody | RTVAAPSVFIFPPSDEQLKSGTASVVCLLNNFYPREAKVQWKVDNALQSG |
| | Kappa | NSQESVTEQDSKDSTYSLSSTLTLSKADYEKHKVYACEVTHQGLSSPVTK |
| | Constant | SENRGEC |
| | Domain | |
| | (human) | |
| 46 | IL-2-G4Sx3-Fc | APTSSSTKKTQLQLEHLLLDLQMILNGINNYKNPKLTRMLTFKFYMPKKA |
| | | TELKHLQCLEEELKPLEEVLNLAQSKNFHLRPRDLISNINVIVLELKGSE |
| | | TTFMCEYADETATIVEFLNRWITFSQSIISTLTGGGGSGGGGSGGGGSDK |
| | | THTCPPCPAPEAAGAPSVFLFPPKPKDTLMISRTPEVTCVVVDVSHEDPE |
| | | VKFNWYVDGVEVHNAKTKPREEQYNSTYRVVSVLTVLHQDWLNGKEYKCK |
| | | VSNKALPAPIEKTISKAKGQPREPQVYTLPPSREEMTKNQVSLTCLVKGF |
| | | YPSDIAVEWESNGQPENNYKTTPPVLDSDGSFFLYSKLTVDKSRWQQGNV |
| | | FSCSVMHEALHNHYTQKSLSLSPG |
| 47 | IL-2 T3A- | APASSSTKKTQLQLEHLLLDLQMILNGINNYKNPKLTRMLTFKFYMPKKA |
| | G4Sx3-Fc | TELKHLQCLEEELKPLEEVLNLAQSKNFHLRPRDLISNINVIVLELKGSE |
| | | TTFMCEYADETATIVEFLNRWITFSQSIISTLTGGGGSGGGGSGGGGSDK |
| | | THTCPPCPAPEAAGAPSVELFPPKPKDTLMISRTPEVTCVVVDVSHEDPE |
| | | VKFNWYVDGVEVHNAKTKPREEQYNSTYRVVSVLTVLHQDWLNGKEYKCK |
| | | VSNKALPAPIEKTISKAKGQPREPQVYTLPPSREEMTKNQVSLTCLVKGF |
| | | YPSDIAVEWESNGQPENNYKTTPPVLDSDGSFFLYSKLTVDKSRWQQGNV |
| | | FSCSVMHEALHNHYTQKSLSLSPG |
| 48 | IL-2 N88R- | APTSSSTKKTQLQLEHLLLDLQMILNGINNYKNPKLTRMLTFKFYMPKKA |
| | G4Sx3-Fc | TELKHLQCLEEELKPLEEVLNLAQSKNFHLRPRDLISRINVIVLELKGSE |
| | | TTFMCEYADETATIVEFLNRWITFSQSIISTLTGGGGSGGGGSGGGGSDK |
| | | THTCPPCPAPEAAGAPSVELFPPKPKDTLMISRTPEVTCVVVDVSHEDPE |
| | | VKFNWYVDGVEVHNAKTKPREEQYNSTYRVVSVLTVLHQDWLNGKEYKCK |
| | | VSNKALPAPIEKTISKAKGQPREPQVYTLPPSREEMTKNQVSLTCLVKGF |
| | | YPSDIAVEWESNGQPENNYKTTPPVLDSDGSFFLYSKLTVDKSRWQQGNV |
| | | FSCSVMHEALHNHYTQKSLSLSPG |
| 49 | IL-2 V69A, | APTSSSTKKTQLQLEHLLLDLQMILNGINNYKNPKLTRMLTFKFYMPKKA |
| | Q74P,-G4Sx3- | TELKHLQCLEEELKPLEEALNLAPSKNFHLRPRDLISNINVIVLELKGSE |
| | Fc | TTFMCEYADETATIVEFLNRWITFSQSIISTLTGGGGSGGGGSGGGGSDK |
| | | THTCPPCPAPEAAGAPSVFLFPPKPKDTLMISRTPEVTCVVVDVSHEDPE |
| | | VKFNWYVDGVEVHNAKTKPREEQYNSTYRVVSVLTVLHQDWLNGKEYKCK |
| | | VSNKALPAPIEKTISKAKGQPREPQVYTLPPSREEMTKNQVSLTCLVKGE |
| | | YPSDIAVEWESNGQPENNYKTTPPVLDSDGSFFLYSKLTVDKSRWQQGNV |
| | | FSCSVMHEALHNHYTQKSLSLSPG |
| 50 | IL-2 N88D | APTSSSTKKTQLQLEHLLLDLQMILNGINNYKNPKLTRMLTFKFYMPKKA |
| | V69A, Q74P- | TELKHLQCLEEELKPLEEALNLAPSKNFHLRPRDLISDINVIVLELKGSE |
| | G4Sx3-Fc | TTFMCEYADETATIVEFLNRWITESQSIISTLTGGGGSGGGGSGGGGSDK |
| | | THTCPPCPAPEAAGAPSVELFPPKPKDTLMISRTPEVTCVVVDVSHEDPE |
| | | VKFNWYVDGVEVHNAKTKPREEQYNSTYRVVSVLTVLHQDWLNGKEYKCK |
| | | VSNKALPAPIEKTISKAKGQPREPQVYTLPPSREEMTKNQVSLTCLVKGF |
| | | YPSDIAVEWESNGQPENNYKTTPPVLDSDGSFFLYSKLTVDKSRWQQGNV |
| | | FSCSVMHEALHNHYTQKSLSLSPG |
| 51 | IL-2 N88R | APTSSSTKKTQLQLEHLLLDLQMILNGINNYKNPKLTRMLTFKFYMPKKA |
| | V69A, Q74P- | TELKHLQCLEEELKPLEEALNLAPSKNFHLRPRDLISRINVIVLELKGSE |
| | G4Sx3-Fc | TTEMCEYADETATIVEFLNRWITFSQSIISTLTGGGGSGGGGSGGGGSDK |
| | | THTCPPCPAPEAAGAPSVELFPPKPKDTLMISRTPEVTCVVVDVSHEDPE |
| | | VKFNWYVDGVEVHNAKTKPREEQYNSTYRVVSVLTVLHQDWLNGKEYKCK |
| | | VSNKALPAPIEKTISKAKGQPREPQVYTLPPSREEMTKNQVSLTCLVKGF |
| | | YPSDIAVEWESNGQPENNYKTTPPVLDSDGSFFLYSKLTVDKSRWQQGNV |
| | | FSCSVMHEALHNHYTQKSLSLSPG |
| 52 | IL-2 N88D- | APTSSSTKKTQLQLEHLLLDLQMILNGINNYKNPKLTRMLTFKFYMPKKA |
| | G4Sx3-Fc | TELKHLQCLEEELKPLEEVLNLAQSKNFHLRPRDLISDINVIVLELKGSE |
| | | TTFMCEYADETATIVEFLNRWITFSQSIISTLTGGGGSGGGGSGGGGSDK |
| | | THTCPPCPAPEAAGAPSVFLFPPKPKDTLMISRTPEVTCVVVDVSHEDPE |
| | | VKFNWYVDGVEVHNAKTKPREEQYNSTYRVVSVLTVLHQDWLNGKEYKCK |
| | | VSNKALPAPIEKTISKAKGQPREPQVYTLPPSREEMTKNQVSLTCLVKGF |
| | | YPSDIAVEWESNGQPENNYKTTPPVLDSDGSFFLYSKLTVDKSRWQQGNV |
| | | FSCSVMHEALHNHYTQKSLSLSPG |
| 53 | IL-2 L53I | APTSSSTKKTQLQLEHLLLDLQMILNGINNYKNPKLTRMLTFKFYMPKKA |
| | N88D V69A, | TEIKHLQCLEEELKPLEEALNLAPSKNFHLRPRDLISDINVIVLELKGSE |
| | Q74P,C125S- | TTFMCEYADETATIVEFLNRWITFSQSIISTLTGGGGSGGGGSGGGGSGG |
| | G4Sx4-Fc | GGSDKTHTCPPCPAPEAAGAPSVELFPPKPKDTLMISRTPEVTCVVVDVS |
| | | HEDPEVKENWYVDGVEVHNAKTKPREEQYNSTYRVVSVLTVLHQDWLNGK |
| | | EYKCKVSNKALPAPIEKTISKAKGQPREPQVYTLPPSREEMTKNQVSLTC |
| | | LVKGFYPSDIAVEWESNGQPENNYKTTPPVLDSDGSFFLYSKLTVDKSRW |
| | | QQGNVFSCSVMHEALHNHYTQKSLSLSPG |
| 54 | IL-2 L56I | APTSSSTKKTQLQLEHLLLDLQMILNGINNYKNPKLTRMLTFKFYMPKKA |
| | N88D V69A, | TELKHIQCLEEELKPLEEALNLAPSKNFHLRPRDLISDINVIVLELKGSE |
| | Q74P, C125S | TTFMCEYADETATIVEFLNRWITFSQSIISTLTGGGGSGGGGSGGGGSGG |
| | G4Sx4-Fc | GGSDKTHTCPPCPAPEAAGAPSVELFPPKPKDTLMISRTPEVTCVVVDVS |
| | | HEDPEVKFNWYVDGVEVHNAKTKPREEQYNSTYRVVSVLTVLHQDWLNGK |
| | | EYKCKVSNKALPAPIEKTISKAKGQPREPQVYTLPPSREEMTKNQVSLTC |
| | | LVKGFYPSDIAVEWESNGQPENNYKTTPPVLDSDGSFFLYSKLTVDKSRW |
| | | QQGNVFSCSVMHEALHNHYTQKSLSLSPG |
| 55 | IL-2 L80I | APTSSSTKKTQLQLEHLLLDLQMILNGINNYKNPKLTRMLTFKFYMPKKA |
| | N88D V69A, | TELKHLQCLEEELKPLEEALNLAPSKNFHIRPRDLISDINVIVLELKGSE |
| | C125S Q74P- | TTFMCEYADETATIVEFLNRWITESQSIISTLTGGGGSGGGGSGGGGSGG |
| | G4Sx4-Fc | GGSDKTHTCPPCPAPEAAGAPSVELFPPKPKDTLMISRTPEVTCVVVDVS |
| | | HEDPEVKENWYVDGVEVHNAKTKPREEQYNSTYRVVSVLTVLHQDWLNGK |
| | | EYKCKVSNKALPAPIEKTISKAKGQPREPQVYTLPPSREEMTKNQVSLTC |
| | | LVKGFYPSDIAVEWESNGQPENNYKTTPPVLDSDGSFFLYSKLTVDKSRW |
| | | QQGNVFSCSVMHEALHNHYTQKSLSLSPG |
| 56 | IL-2 L118I | APTSSSTKKTQLQLEHLLLDLQMILNGINNYKNPKLTRMLTFKFYMPKKA |
| | N88D V69A, | TELKHLQCLEEELKPLEEALNLAPSKNFHLRPRDLISDINVIVLELKGSE |
| | Q74P, C125S- | TTFMCEYADETATIVEFINRWITFSQSIISTLTGGGGSGGGGSGGGGSGG |
| | G4Sx4-Fc | GGSDKTHTCPPCPAPEAAGAPSVELFPPKPKDTLMISRTPEVTCVVVDVS |
| | | HEDPEVKENWYVDGVEVHNAKTKPREEQYNSTYRVVSVLTVLHQDWLNGK |
| | | EYKCKVSNKALPAPIEKTISKAKGQPREPQVYTLPPSREEMTKNQVSLTC |
| | | LVKGFYPSDIAVEWESNGQPENNYKTTPPVLDSDGSFFLYSKLTVDKSRW |
| | | QQGNVFSCSVMHEALHNHYTQKSLSLSPG |
| 57 | IL-2 N88D | APTSSSTKKTQLQLEHLLLDLQMILNGINNYKNPKLTRMLTFKFYMPKKA |
| | V69A, Q74P- | TELKHLQCLEEELKPLEEALNLAPSKNFHLRPRDLISDINVIVLELKGSE |
| | G4Sx4-Fc | TTFMCEYADETATIVEFLNRWITFSQSIISTLTGGGGSGGGGSGGGGSGG |
| | | GGSDKTHTCPPCPAPEAAGAPSVELFPPKPKDTLMISRTPEVTCVVVDVS |
| | | HEDPEVKENWYVDGVEVHNAKTKPREEQYNSTYRVVSVLTVLHQDWLNGK |
| | | EYKCKVSNKALPAPIEKTISKAKGQPREPQVYTLPPSREEMTKNQVSLTC |
| | | LVKGFYPSDIAVEWESNGQPENNYKTTPPVLDSDGSFFLYSKLTVDKSRW |
| | | QQGNVFSCSVMHEALHNHYTQKSLSLSPG |
| 58 | Fc-G4S-IL-2 | DKTHTCPPCPAPELLGGPSVFLFPPKPKDTLMISRTPEVTCVVVDVSHED |
| | N88D V69A, | PEVKFNWYVDGVEVHNAKTKPREEQYGSTYRVVSVLTVLHQDWLNGKEYK |
| | Q74P | CKVSNKALPAPIEKTISKAKGQPREPQVYTLPPSREEMTKNQVSLTCLVK |
| | | GFYPSDIAVEWESNGQPENNYKTTPPVLDSDGSFFLYSKLTVDKSRWQQG |
| | | NVFSCSVMHEALHNHYTQKSLSLSPGGGGGSAPTSSSTKKTQLQLEHLLL |
| | | DLQMILNGINNYKNPKLTRMLTFKFYMPKKATELKHLQCLEEELKPLEEA |
| | | LNLAPSKNFHLRPRDLISDINVIVLELKGSETTEMCEYADETATIVEFLN |
| | | RWITFAQSIISTLT |
| 59 | IL-2 N88D | APTSSSTKKTQLQLEHLLLDLQMILNGINNYKNPKLTRMLTFKFYMPKKA |
| | V69A, Q74P, | TEX₁KHX₂QCLEEELKPLEEALNLAPSKNFHX₃RPRDLISDINVIVLELK |
| | C125S-G4Sx4- | GSETTEMCEYADETATIVEFX₄NRWITFSQSIISTLTGGGGSGGGGSGGG |
| | Fc, wherein | GSGGGGSDKTHTCPPCPAPEAAGAPSVELFPPKPKDTLMISRTPEVTCVV |
| | at least one | VDVSHEDPEVKENWYVDGVEVHNAKTKPREEQYNSTYRVVSVLTVLHQDW |
| | of X₁, X₂, X₃, | LNGKEYKCKVSNKALPAPIEKTISKAKGQPREPQVYTLPPSREEMTKNQV |
| | and X₄ is I | SLTCLVKGFYPSDIAVEWESNGQPENNYKTTPPVLDSDGSFFLYSKLTVD |
| | and the | KSRWQQGNVFSCSVMHEALHNHYTQKSLSLSPG |
| | remainder are | |
| | L or I. | |
| 60 | IL-2 N88D | APTSSSTKKTQLQLEHLLLDLQMILNGINNYKNPKLTRMLTFKFYMPKKA |
| | V69A, Q74P, | TEX₁KHX₂QCLEEELKPLEEALNLAPSKNFHX₃RPRDLISDINVIVLELK |
| | C125S, | GSETTEMCEYADETATIVEFX₄NRWITFSQSIISTLT |
| | wherein at | |
| | least one of | |
| | X₁, X₂, X₃, | |
| | and X₄ is I | |
| | and the | |
| | remainder are | |
| | L or I. | |

[0192] In some embodiments, the sequences shown in the table or throughout comprise one or mutations that correspond to positions L53, L56, L80, and L118. In some embodiments, the sequences shown in the table or throughout do not comprise one or more mutations that correspond to positions L53, L56, L80, and L118. In some embodiments, the sequences shown in the table or throughout the present application comprise or one or more mutations that correspond to positions L59I, L63I, I24L, L94I, L96I or L1321 or other substitutions at the same positions. In some embodiments, the sequences shown in the table or throughout the present application do not comprise one or more mutations that correspond to positions L59I, L63I, I24L, L94I, L96I or L132I or other substitutions at the same positions. In some embodiments, the mutation is leucine to isoleucine. In some embodiments, the mutein does not comprise other mutations than as shown or described herein. In some embodiments, the peptide comprises a sequence of SEQ ID NO: 21, SEQ ID NO: 31, SEQ ID NO: 32, SEQ ID NO: 33, SEQ ID NO: 34, SEQ ID NO: 35, SEQ ID NO: 36, SEQ ID NO: 37, SEQ ID NO: 38, SEQ ID NO: 39, SEQ ID NO: 40, SEQ ID NO: 41, SEQ ID NO: 43, SEQ ID NO: 44, SEQ ID NO: 45, SEQ ID NO: 46, SEQ ID NO: 47, SEQ ID NO: 48, SEQ ID NO: 49, SEQ ID NO: 50, SEQ ID NO: 51, SEQ ID NO: 52, SEQ ID NO: 53, SEQ ID NO: 54, SEQ ID NO: 55, or SEQ ID NO: 56, SEQ ID NO: 57, SEQ ID NO: 58, SEQ ID NO: 59, or SEQ ID NO: 60.

[0193] In some embodiments, the protein comprises an IL-2 mutein as provided for herein. In some embodiments, a polypeptide is provided comprising SEQ ID NO: 59 or SEQ ID NO: 60, wherein at least one of X₁, X₂, X₃, and X₄ is I and the remainder are L or I. In some embodiments, X₁, X₂, and X₃ are L and X₄ is I. In some embodiments, X₁, X₂, and X₄ are L and X₃ is I. In some embodiments, X₂, X₃, and X₄ are L and X₁ is I. In some embodiments, X₁, X₃, and X₄ are L and X₂ is I. In some embodiments, X₁ and X₂ are L and X₃ and X₄ are I. In some embodiments, X₁ and X₃ are L and X₂ and X₄ are I. In some embodiments, X₁ and X₄ are L and X₂ and X₃ are I. In some embodiments, X₂ and X₃ are L and X₁ and X₄ are I. In some embodiments, X₂ and X₄ are L and X₁ and X₃ are I. In some embodiments, X₃ and X₄ are L and X₁ and X₂ are I. In some embodiments, X₁, X₂, and X₃ are L and X₄ is I. In some embodiments, X₂, X₃, and X₄ are L and X₁ is I. In some embodiments, X₁, X₃, and X₄ are L and X₂ is I. In some embodiments, X₁, X₂, and X₄ are L and X₃ is I.

[0194] In some embodiments, the Fc portion of the fusion is not included. In some embodiments, the peptide consists essentially of an IL-2 mutein provided for herein. In some embodiments, the protein is free of a Fc portion.

[0195] For illustrative purposes only, embodiments of IL-2 mutein fused with a Fc and with an effector moiety are illustrated in FIG. 19.

[0196] The sequences are for illustrative purposes only and are not intended to be limiting. In some embodiments, the compound comprises an amino acid sequence of SEQ ID NO: 53, 54, 55, or 56. In some embodiments, the compound comprises an amino acid sequence of SEQ ID NO: 53, 54, 55, or 56 with or without a C125A or C125S mutation. In some embodiments, the residue at position 125 is C, S, or A. In some embodiments, the compound comprises an amino acid sequence of SEQ ID NO: 59 or SEQ ID NO: 60, wherein at least one of X₁, X₂, X₃, and X₄ is I and the remainder are L or I. In some embodiments, the protein comprises an IL-2 mutein as provided for herein. In some embodiments, a polypeptide is provided comprising SEQ ID NO: 59 or SEQ ID NO: 60, wherein at least one of X₁, X₂, X₃, and X₄ is I and the remainder are L or I. In some embodiments, X₁, X₂, and X₃ are L and X₄ is I. In some embodiments, X₁, X₂, and X₄ are L and X₃ is I. In some embodiments, X₂, X₃, and X₄ are L and X₁ is I. In some embodiments, X₁, X₃, and X₄ are L and X₂ is I. In some embodiments, X₁ and X₂ are L and X₃ and X₄ are I. In some embodiments, X₁ and X₃ are L and X₂ and X₄ are I. In some embodiments, X₁ and X₄ are L and X₂ and X₃ are I. In some embodiments, X₂ and X₃ are L and X₁ and X₄ are I. In some embodiments, X₂ and X₄ are L and X₁ and X₃ are I. In some embodiments, X₃ and X₄ are L and X₁ and X₂ are I. In some embodiments, X₁, X₂, and X₃ are L and X₄ is I. In some embodiments, X₂, X₃, and X₄ are L and X₁ is I. In some embodiments, X₁, X₃, and X₄ are L and X₂ is I. In some embodiments, X₁, X₂, and X₄ are L and X₃ is I.

[0197] Each of the proteins may also be considered to have the C125S and the LALA and/or G237A mutations as provided for herein. The C125 substitution can also be C125A as described throughout the present application.

[0198] In an embodiment, an IL-2 mutein molecule comprises at least 60, 70, 80, 85, 90, 95, or 97% sequence identity or homology with a naturally occurring human IL-2 molecule, e.g., a naturally occurring IL-2 sequence disclosed herein or those that incorporated by reference.

[0199] The proteins can be produced with or without a C125A or C125S mutation in the IL-2 mutein. Examples of IL-2 muteins that can be included are illustrated herein, such as, but not limited to, a sequence of SEQ ID NO: 59 or SEQ ID NO: 60.

[0200] In some embodiments, the constant kappa domain in any of the light chains can be replaced with a constant lambda domain.

### Donor Tissue

[0201] Therapeutic compounds and methods described herein can be used in conjunction with a transplantation of donor tissue into a subject and can minimizes rejection of, minimizes immune effector cell mediated damage to, prolongs acceptance of, or prolongs the functional life of, donor transplant tissue. The tissue can be xenograft or allograft tissue. Transplanted tissue can comprise all or part of an organ, e.g., a liver, kidney, heart, pancreas, thymus, skin or lung.

[0202] In embodiments, therapeutic compounds described herein reduce, or eliminate the need for systemic immune suppression. Therapeutic compounds and methods described herein can also be used to treat GVHD. In some embodiments, host cells are coated with a therapeutic compound that comprises, as an effector binding/modulating moiety, a PD-L1 molecule.

[0203] Table 2 provides target molecules for transplant indications. A target molecule is the target to which a targeting moiety binds. For example, the PD-1 antibodies provided herein can be used and targeted towards a transplanted tissue or organ. As discussed elsewhere herein, In some embodiments, a targeting moiety is selected that binds a product of an allele present on donor tissue and which is not expressed by the subject (recipient) or at expressed at a different level (e.g. reduced or substantially reduced).

TABLE 5
Target Molecules for Transplant Indications

| | Organ/ | |
|---|---|---|
| Indication | cell type | Target |
| Allograft transplant tissue, | All | HLA-A, HLA-B, HLA-C, |
| e.g., allograft solid organ | | HLA-DP, HLA-DQ or HLA- |
| transplant, GvHD | | DR |
| Transplant | Kidney | Antigens expressed in the |
| | | kidney where immune |
| | | cells infiltrate, for example |
| | | including but not limited to |
| | | the tubular interstitial |
| | | region e.g. Uromodulin, |
| | | SLC22A2, SLC22A6, FXYD4, |
| | | SLC5A10, SLC6A13, AQP6, |
| | | SLC13A3, TMEM72, BSND, |
| | | NPR3, and the proximal |
| | | and distal tubular |
| | | epithelium, such as OAT1, |
| | | OCT2 |

### Auto-Immune Disorders

[0204] Therapeutic compounds and methods described herein can be used to treat a subject having or at risk for having an unwanted autoimmune response, e.g., an auto immune response in Type 1 Diabetes, Multiple Sclerosis, Cardiomyositis, vitiligo, alopecia, inflammatory bowel disease (IBD, e.g. Crohn's disease or ulcerative colitis), Sjogren's syndrome, focal segmented glomerular sclerosis (FSGS), scleroderma/systemic sclerosis (SSc) or rheumatoid arthritis. In some embodiments, the treatment minimizes rejection of, minimizes immune effector cell mediated damage to, prolongs the survival of subject tissue undergoing, or a risk for, autoimmune attack. Table 3 provides target molecules for several autoimmune indications and organ/cell types. A target molecule is the target to which a targeting moiety binds.

TABLE 2
Target Molecules for autoimmune indications

| Indication | Organ/cell type | Target Molecule |
|---|---|---|
| Type 1 Diabetes and | Pancreas/Pancreatic islets, | SEZ6L2, LRP11, DISP2, |
| Transplant | beta cells | SLC30A8, FXYD2 |
| | | TSPAN7 TMEM27 |
| | | (reference Hald et al. 2012 |
| | | Diabetelogia 55: 154); |
| | | FXYD2; GPR119; |
| | | HEPACAM2, |
| | | DPP6, or MAdCAM |
| Multiple Sclerosis | CNS/myelin sheath of | MOG, PLP, MBP |
| | oligodendrocytes | |
| Cardiomyositis, rheumatoid | Cardiomyocytes, monocytes, | SIRPA (CD172a) |
| arthritis | macrophages, myeloid cells | |
| Inflammatory bowel disease | Intestine | MAdCAM |
| (ulcerative colitis, Crohn's | | |
| disease) or GVHD; Celiac | | |
| disease | | |
| Autoimmune hepatitis | liver | MAdCAM |
| (AIH); Primary Sclerosing | | |
| Cholangitis (PSC); | | |
| Primary Biliary Sclerosis; | | |
| (PBC); | | |
| transplant | | |
| Focal Segmented | Kidney, podocytes, tubules, | COL1A1, Cadherin 2, |
| Glomerular Sclerosis | epithelial cells | VCAM-1, Thy1, Podocin, |
| (FSGS) and other diseases | | KIM1 (Hodgin et al, Am J |
| that can affect kidney for | | Pathol 177: 1675 2010); |
| example lupus nephritis, | | PLA2R; OAT1; OCT2; K- |
| systemic scleroderma, | | cadherin 6; CDH16 |
| membranous glomerular | | |
| nephropathy (MGN); | | |
| Membranous nephropathy | | |
| (MN); Minimal Change | | |
| Disease (MCD); IgA | | |
| nephropathy; ANCA- | | |
| associated vasculitis (AAV) | | |
| Sjogren's syndrome | Salivary glands, epithelial | FCGR3B, HLAB, KIM1 |
| | cells, kidney | (Hu et al Arth and Rheum |
| | | 56: 3588 2007 |
| Scleroderma, systemic | skin, kidney, lung, | Collagen I, III, VI, VII, |
| sclerosis (SSc) | Fibroblasts, connective tissue | fibronectin (Wang et al Arth |
| | | and Rheum 54: 2271 2006) |
| vitiligo | Skin, epidermis, Langerhans | COL17A1, CD1A, CD207, |
| | cells, keratinocytes, | desmoglein 1-4, keratin 1 |
| | melanocytes | |
| Alopecia areata | Skin, Hair follicle/hair bulb, | CD133 (Yang and |
| | dermis | Cotsarelis, J Dermatol Sci |
| | | 57: 2 2010) |

[0205] Accordingly, the PD-1 antibodies provided for herein can be linked to binding partners that bind to the targets listed in the table above.

[0206] Other examples of autoimmune disorders and diseases that can be treated with the compounds described herein include, but are not limited to, Myocarditis, Postmyocardial infarction syndrome, Postpericardiotomy syndrome, Subacute bacterial endocarditis, Anti-Glomerular Basement Membrane nephritis, Interstitial cystitis, Lupus nephritis, membranous glomerulonephropathy, Chronic Kidney Disease (“CKD”), Autoimmune hepatitis, Primary biliary cirrhosis, Primary sclerosing cholangitis, Antisynthetase syndrome, alopecia areata, autoimmune angioedema, autoimmune progesterone dermatitis, autoimmune urticaria, bullous pemphigoid, cicatricial pemphigoid, dermatitis herpetiformis, discoid lupus erythematosus, epidermolysis bullosa acquisita, erythema nodosum, gestational pemphigoid, hidradenitis suppurativa, lichen planus, lichen sclerosus, linear iga disease (lad), morphea, pemphigus vulgaris, pityriasis lichenoides et varioliformis acuta, mucha-habermann disease, psoriasis, systemic scleroderma, vitiligo, Addison's disease, Autoimmune polyendocrine syndrome (APS) type 1, Autoimmune polyendocrine syndrome (APS) type 2, Autoimmune polyendocrine syndrome (APS) type 3, Autoimmune pancreatitis (AIP), Diabetes mellitus type 1, Autoimmune thyroiditis, Ord's thyroiditis, Graves' disease, Autoimmune Oophoritis, Endometriosis, Autoimmune orchitis, Sjogren's syndrome, Autoimmune enteropathy, Coeliac disease, Crohn's disease, Microscopic colitis, Ulcerative colitis, thrombocytopenia, Adiposis, dolorosa, Adult-onset Still's, disease, Ankylosing, Spondylitis, CREST syndrome, Drug-induced lupus, Enthesitis-related arthritis, Eosinophilic fasciitis, Felty syndrome, IgG4-related disease, Juvenile, Arthritis, Lyme disease (Chronic), Mixed connective tissue disease (MCTD), Palindromic rheumatism, Parry Romberg syndrome, Parsonage-Turner syndrome, Psoriatic arthritis, Reactive arthritis, Relapsing polychondritis, Retroperitoneal fibrosis, Rheumatic fever, Rheumatoid arthritis, Sarcoidosis, Schnitzler syndrome, Systemic Lupus Erythematosus (SLE), Undifferentiated connective tissue disease (UCTD), Dermatomyositis, Fibromyalgia, Inclusion body myositis, Myositis, Myasthenia gravis, Neuromyotonia, Paraneoplastic cerebellar degeneration, Polymyositis, Acute disseminated encephalomyelitis (ADEM), Acute motor axonal neuropathy, Anti-N-Methyl-D-Aspartate (anti-NMDA) Receptor Encephalitis, Balo concentric sclerosis, Bickerstaff's encephalitis, Chronic inflammatory demyelinating polyneuropathy, Guillain-Barre syndrome, Hashimoto's encephalopathy, Idiopathic inflammatory demyelinating diseases, Lambert-Eaton myasthenic syndrome, Multiple sclerosis, Oshtoran syndrome, Pediatric Autoimmune Neuropsychiatric Disorder Associated with Streptococcus (PANDAS), Progressive inflammatory neuropathy, Restless leg syndrome, Stiff person syndrome, Sydenham chorea, Transverse myelitis, Autoimmune retinopathy, Autoimmune uveitis, Cogan syndrome, Graves ophthalmopathy, Intermediate uveitis, Ligneous conjunctivitis, Mooren's ulcer, Neuromyelitis optica, Opsoclonus myoclonus syndrome, Optic neuritis, Scleritis, Susac's syndrome, Sympathetic ophthalmia, Tolosa-Hunt syndrome, Autoimmune inner ear disease (AIED), Meniere's disease, Behcet's disease, Eosinophilic granulomatosis with polyangiitis (EGPA), Giant cell arteritis, Granulmatosis with polyangiitis (GPA), IgA vasculitis (IgAV), Kawasaki's disease, Leukocytoclastic vasculitis, Lupus vasculitis, Rheumatoid vasculitis, Microscopic polyangiitis (MPA), Polyarteritis nodosa (PAN), Polymyalgia rheumaticia, Vasculitis, Primary Immune Deficiency, and the like.

[0207] Other examples of potential autoimmune disorders and diseases, as well as autoimmune comorbidities that can be treated with the compounds described herein include, but are not limited to, Chronic fatigue syndrome, Complex regional pain syndrome, Eosinophilic esophagitis, Gastirtis, Interstitial lung disease, POEMS syndrome, Raynaud's phenomenon, Primary immunodeficiency, Pyoderma gangrenosum, Agammaglobulinemia, Anyloidosis, Anyotrophic lateral sclerosis, Anti-tubular basement membrane nephritis, Atopic allergy, Atopic dermatitis, Autoimmune peripheral neuropathy, Blau syndrome, Castleman's disease, Chagas disease, Chronic obstructive pulmonary disease, Chronic recurrent multifocal osteomyelitis, Complement component 2 deficiency, Contact dermatitis, Cushing's syndrome, Cutaneous leukocytoclastic angiitis, Dego' deiase, Eczema, Eosinophilic gastroenteritis, Eosinophilic pneumonia, Erythroblastosis fetalsis, Fibrodysplasia ossificans progressive, Gastrointestinal pemphigoid, Hypogammaglobulinemia, Idiopathic giant-cell myocarditis, Idiopathic pulmonary fibrosis, IgA nephropathy, Immunregulatory lipoproteins, IPEX syndrome, Ligenous conjunctivitis, Majeed syndrome, Narcolepsy, Rasmussen's encephalitis, Schizophrenia, Serum sickness, Spondyloathropathy, Sweet's syndrome, Takayasu's arteritis, and the like.

[0208] In some embodiments, the autoimmune disorder does not comprise pemphigus Vulgaris, pemphigus. In some embodiments, the autoimmune disorder does not comprise pemphigus foliaceus. In some embodiments, the autoimmune disorder does not comprise bullous pemphigoid. In some embodiments, the autoimmune disorder does not comprise Goodpasture's Disease. In some embodiments, the autoimmune disorder does not comprise psoriasis. In some embodiments, the autoimmune disorder does not comprise a skin disorder. In some embodiments, the disorder does not comprise a neoplastic disorder, e.g., cancer.

### Therapeutic Compounds

[0209] A therapeutic compound comprises a specific targeting moiety functionally associated with an effector binding/modulating moiety. In some embodiments, the specific targeting moiety and effector binding/modulating moiety are linked to one another by a covalent or noncovalent bond, e.g., a covalent or non-covalent bond directly linking the one to the other. In other embodiments, a specific targeting moiety and effector binding/modulating moiety are linked, e.g., covalently or noncovalently, through a linker moiety. E.g., in the case of a fusion polypeptide, a polypeptide sequence comprising the specific targeting moiety and a polypeptide sequence can be directly linked to one another or linked through one or more linker sequences. In some embodiments, the linker moiety comprises a polypeptide. Linkers are not, however, limited to polypeptides. In some embodiments, a linker moiety comprises other backbones, e.g., anon-peptide polymer, e.g., a PEG polymer. In some embodiments, a linker moiety can comprise a particle, e.g., a nanoparticle, e.g., a polymeric nanoparticle. In some embodiments, a linker moiety can comprise a branched molecule, or a dendrimer. However, in embodiments where the effector binding/modulating moiety comprises an ICIM binding/modulating moiety (which binds an effector like PD-1) structures that result in clustering in the absence of target binding should be avoided as they may cause clustering in the absence of target binding. Thus in embodiments, the therapeutic compound has a structure, e.g., the copies of an ICIM are sufficiently limited, such that clustering in the absence of target binding is minimized or substantially eliminated, or eliminated, or is sufficiently minimized that substantial systemic immune suppression does not occur.

[0210] In some embodiments, a therapeutic compound comprises a polypeptide comprising a specific targeting moiety covalently or non-covalently conjugated to an effector binding/modulating moiety. In some embodiments, a therapeutic molecule comprises a fusion protein having comprising a specific targeting moiety fused, e.g., directly or through a linking moiety comprising one or more amino acid residues, to an effector binding/modulating moiety. In some embodiments, a therapeutic molecule comprises a polypeptide comprising a specific targeting moiety linked by a non-covalent bond or a covalent bond, e.g., a covalent bond other than a peptide bond, e.g., a sulfhydryl bond, to an effector binding/modulating moiety.

[0211] In some embodiments, a therapeutic compound comprises polypeptide, e.g., a fusion polypeptide, comprising:
[0212] 1.a) a specific targeting moiety comprising a target specific binding polypeptide;
[0213] 1.b) a specific targeting moiety comprising a target ligand binding molecule;
[0214] 1.c) a specific targeting moiety comprising an antibody molecule;
[0215] 1.d) a specific targeting moiety comprising a single chain antibody molecule, e.g., a scFv domain; or
[0216] 1.e) a specific targeting moiety comprising a first of the light or heavy chain variable region of an antibody molecule, and wherein the other variable region is covalently or non covalently associated with the first;
[0217] and
[0218] 2.a) an effector binding/modulating moiety comprising an effector specific binding polypeptide;
[0219] 2.b) an effector binding/modulating moiety comprising an effector ligand binding molecule;
[0220] 2.c) an effector binding/modulating moiety comprising an antibody molecule;
[0221] 2.d) an effector binding/modulating moiety comprising a single chain antibody molecule, e.g., a scFv domain; or
[0222] 2.e) an effector binding/modulating moiety comprising a first of the light or heavy chain variable region of an antibody molecule, and wherein the other variable region is covalently or non covalently associated with the first.

[0223] In some embodiments, a therapeutic compound comprises 1.a and 2.a.

[0224] In some embodiments, a therapeutic compound comprises 1.a and 2.b.

[0225] In some embodiments, a therapeutic compound comprises 1.a and 2.c.

[0226] In some embodiments, a therapeutic compound comprises 1.a and 2.d.

[0227] In some embodiments, a therapeutic compound comprises 1.a and 2.e.

[0228] In some embodiments, a therapeutic compound comprises 1.b and 2.a.

[0229] In some embodiments, a therapeutic compound comprises 1.b and 2.b.

[0230] In some embodiments, a therapeutic compound comprises 1.b and 2.c.

[0231] In some embodiments, a therapeutic compound comprises 1.b and 2.d.

[0232] In some embodiments, a therapeutic compound comprises 1.b and 2.e.

[0233] In some embodiments, a therapeutic compound comprises 1.c and 2.a.

[0234] In some embodiments, a therapeutic compound comprises 1.c and 2.b.

[0235] In some embodiments, a therapeutic compound comprises 1.c and 2.c.

[0236] In some embodiments, a therapeutic compound comprises 1.c and 2.d.

[0237] In some embodiments, a therapeutic compound comprises 1.c and 2.e.

[0238] In some embodiments, a therapeutic compound comprises 1.d and 2.a.

[0239] In some embodiments, a therapeutic compound comprises 1.d and 2.b.

[0240] In some embodiments, a therapeutic compound comprises 1.d and 2.c.

[0241] In some embodiments, a therapeutic compound comprises 1.d and 2.d.

[0242] In some embodiments, a therapeutic compound comprises 1.d and 2.e.

[0243] In some embodiments, a therapeutic compound comprises 1.e and 2.a.

[0244] In some embodiments, a therapeutic compound comprises 1.e and 2.b.

[0245] In some embodiments, a therapeutic compound comprises 1.e and 2.c.

[0246] In some embodiments, a therapeutic compound comprises 1.e and 2.d.

[0247] In some embodiments, a therapeutic compound comprises 1.e and 2.e.

[0248] Therapeutic compounds disclosed herein can, for example, comprise a plurality of effector binding/modulating and specific targeting moieties. Any suitable linker or platform can be used to present the plurality of moieties. The linker is typically coupled or fused to one or more effector binding/modulating and targeting moieties.

[0249] In some embodiments, two (or more) linkers associate, either covalently or non-covelaently, e.g., to form a hetero or homo-dimeric therapeutic compound. E.g., the linker can comprise an Fc region and two Fc regions associate with one another. In some embodiments of a therapeutic compound comprising two linker regions, the linker regions can self-associate, e.g., as two identical Fc regions. In some embodiments of a therapeutic compound comprising two linker regions, the linker regions are not capable of, or not capable of substantial, self-association, e.g., the two Fc regions can be members of a knob and hole pair.

[0250] Non-limiting exemplary configurations of therapeutic compounds comprise the following (e.g., in N to C terminal order):
[0251] R1-Linker Region A-R2
[0252] R3-Linker Region B-R4,
   wherein,
[0253] R1, R2, R3, and R4, each independently comprises an effector binding/modulating moiety, e.g., an ICIM binding/modulating moiety, an IIC binding/modulating moiety, ICSM binding/modulating moiety, or an SM binding/modulating moiety; a specific targeting moiety; or is absent, provided that at least one of R1 and R2 is not absent, and at least one of R3 and R4 is not absent;
[0254] Linker Region A and Linker B comprise moieties that can associate with one another, e.g., Linker A and Linker B each comprises an Fc moiety provided that an effector binding/modulating moiety and a specific targeting moiety are present.

[0255] In some embodiments:
[0256] R1 comprises an effector binding/modulating moiety, e.g., an ICIM binding/modulating moiety, an IIC binding/modulating moiety, ICSM binding/modulating moiety, or an SM binding/modulating moiety, or is absent;
[0257] R2 comprises a specific targeting moiety, or is absent;
[0258] R3 comprises an effector binding/modulating moiety, e.g., an ICIM binding/modulating moiety, an IIC binding/modulating moiety, ICSM binding/modulating moiety, or an SM binding/modulating moiety, or is absent;
[0259] R4 comprises a specific targeting moiety, or is absent;

[0260] Linker Region A and Linker B comprise moieties that can associate with one another, e.g., Linker A and Linker B each comprises an Fc moiety, provided that one of R1 or R3 is present and one of R2 or R4 is present.

[0261] In some embodiments:
[0262] R1 comprises a specific targeting moiety, or is absent;
[0263] R2 comprises an effector binding/modulating moiety, e.g., an ICIM binding/modulating moiety, an IIC binding/modulating moiety, ICSM binding/modulating moiety, or an SM binding/modulating moiety, or is absent;
[0264] R3 comprises a specific targeting moiety, or is absent;
[0265] R4 comprises an effector binding/modulating moiety, e.g., an ICIM binding/modulating moiety, an IIC binding/modulating moiety, ICSM binding/modulating moiety, or an SM binding/modulating moiety, or is absent;

[0266] Linker Region A and Linker B comprise moieties that can associate with one another, e.g., Linker A and Linker B each comprises an Fc moiety, provided that one of R1 or R3 is present and one of R2 or R4 is present.

[0267] Non-limiting examples include, but are not limited to:

| | Linker | | | Linker | | |
|---|---|---|---|---|---|---|
| | Region | | | Region | | |
| R1 | A | R2 | R3 | B | R4 | Other |
| HCVR and | Fc | scFv | HCVR | Fc | scFv | Self-Pairing |
| LCVR | Region | | and | Region | | Linker |
| | | | LCVR | | | Regions |
| HCVR and | Fc | scFv | HCVR | Fc | scFv | Non-Self |
| LCVR | Region | | and | Region | | Pairing linker |
| | | | LCVR | | | regions |
| HCVR and | Fc | scFv | HCVR | Fc | scFv | Self-Pairing |
| LCVR (or | Region | | and | Region | | Linker |
| absent) | | | LCVR | | | Regions |
| | | | (or | | | One of R1 or |
| | | | absent) | | | R3 is absent. |
| HCVR and | Fc | scFv | HCVR | Fc | scFv | Non-Self |
| LCVR (or | Region | | and | Region | | Pairing |
| absent) | | | LCVR | | | Linker |
| | | | (or | | | Regions |
| | | | absent) | | | One of R1 or |
| | | | | | | R3 is absent. |
| HCVR and | Fc | scFv | HCVR | Fc | scFv | Self-Pairing |
| LCVR | Region | (or | and | Region | (or | linker regions |
| | | absent) | LCVR | | absent) | One of R2 or |
| | | | | | | R4 is absent. |
| HCVR and | Fc | scFv | HCVR | Fc | scFv | Non-Self |
| LCVR | Region | (or | and | Region | (or | Pairing linker |
| | | absent) | LCVR | | absent) | regions |
| | | | | | | One of R2 or |
| | | | | | | R4 is absent. |
| HCVR and | Fc | scFv | HCVR | Fc | scFv | Self-Pairing |
| LCVR | Region | | and | Region | | Linker |
| | | | LCVR | | | Regions |
| | | | | | | R1 and R3 |
| | | | | | | are the same |
| HCVR and | Fc | scFv | HCVR | Fc | scFv | Non-Self |
| LCVR | Region | | and | Region | | Pairing linker |
| | | | LCVR | | | regions |
| | | | | | | Rland R3 are |
| | | | | | | different |
| HCVR and | Fc | scFv | HCVR | Fc | scFv | Self-Pairing |
| LCVR | Region | | and | Region | | Linker |
| | | | LCVR | | | Regions |
| | | | | | | R2 and R4 |
| | | | | | | are the same |
| HCVR and | Fc | scFv | HCVR | Fc | scFv | Non-Self |
| LCVR | Region | | and | Region | | Pairing linker |
| | | | LCVR | | | regions |
| | | | | | | R2and R4 are |
| | | | | | | different |

HCVR and LCVR: refers to a moiety comprising an antigen binding portion of a heavyand light chain variable region, typically with the heavy chain fused to the Linker region.
Self-pairing: wherein a liker region can pair with itself, e.g., an Fc region that can paira copy of itself.
Non-Self Pairing: wherein a Linker Region does not pair with itself, or does not substantially pair with itself, e.g., an Fc region does not or does not significantly pair with itself, e.g., wherein Linker Region A and Linker Region B are members of a knoband hole pair.

[0268] In some embodiments:
[0269] R1, R2, R3 and R4 each independently comprise: an effector binding modulating moiety that activates an inhibitory receptor on an immune cell, e.g., a T cell or a B cell, e.g., a PD-L1 molecule or a functional anti-PD-1 antibody molecule (an agonist of PD-1); a specific targeting moiety; or is absent, provided that at least one of R1 and R2 is not absent, and at least one of R3 and R4 is not absent;
[0270] provided that an effector binding moiety and a specific targeting moiety are present.

[0271] In some embodiments, Linker A and Linker B comprise Fc moieties (e.g., self-pairing Fc moieties).

[0272] In some embodiments:
[0273] R1 and R3 independently comprise an effector binding modulating moiety that activates an inhibitory receptor on an immune cell, e.g., a T cell or a B cell, e.g., a PD-L1 molecule or a functional anti-PD-1 antibody molecule (an agonist of PD-1); and
[0274] R2 and R4 independently comprise specific targeting moieties, e.g., scFv molecules against a tissue antigen.

[0275] In some embodiments, Linker A and Linker B comprise Fc moieties (e.g., self-pairing Fc moieties).

[0276] In some embodiments:
[0277] R1 and R3 independently comprise a functional anti-PD-1 antibody molecule (an agonist of PD-1); and
[0278] R2 and R4 independently comprise specific targeting moieties, e.g., scFv molecules against a tissue antigen.

[0279] In some embodiments, Linker A and Linker B comprise Fc moieties (e.g., self-pairing Fc moieties).

[0280] In some embodiments:
[0281] R1 and R3 independently comprise specific targeting moieties, e.g., an anti-tissue antigen antibody; and
[0282] R2 and R4 independently comprise a functional anti-PD-1 antibody molecule (an agonist of PD-1), e.g., an scFv molecule.

[0283] In some embodiments, Linker A and Linker B comprise Fc moieties (e.g., self-pairing Fc moieties).

[0284] In some embodiments:
[0285] R1 and R3 independently comprise a PD-L1 molecule (an agonist of PD-1); and
[0286] R2 and R4 independently comprise specific targeting moieties, e.g., scFv molecules against a tissue antigen; and

[0287] In some embodiments, Linker A and Linker B comprise Fc moieties (e.g., self-pairing Fc moieties).

[0288] In some embodiments:
[0289] R1 and R3 independently comprise specific targeting moieties, e.g., an anti-tissue antigen antibody; and
[0290] R2 and R4 independently comprise a PD-L1 molecule (an agonist of PD-1).

[0291] In some embodiments, Linker A and Linker B comprise Fc moieties (e.g., self-pairing Fc moieties).

### Linker Regions

[0292] As discussed elsewhere herein specific targeting and effector binding/modulating moieties can be linked by linker regions. Any linker region described herein can be used as a linker. For example, linker Regions A and B can comprise Fc regions. In some embodiments, a therapeutic compound comprises a Linker Region that can self-associate. In some embodiments, a therapeutic compound comprises a Linker Region that has a moiety that minimizes self-association, and typically Linker Region A and Linker Region B are heterodimers. Linkers also include glycine/serine linkers. In some embodiments, the linker can comprise one or more repeats of GGGGS (SEQ ID NO: 23). In some embodiments, the linker comprises 1, 2, 3, 4, or 5 repeats of SEQ ID NO: 23 (repeats disclosed as SEQ ID NO: 1749). In some embodiments, the linker comprises or GGGGSGGGGSGGGGSGGGGS (SEQ ID NO: 22) GGGGSGGGGSGGGGS (SEQ ID NO: 30). These linkers can be used in any of the therapeutic compounds or compositions provided herein. The linker can also be a GGGGE (SEQ ID NO: 1741) linker or AAAKA (SEQ ID NO: 1742) linker and the like. In some embodiments, the linker comprises 1, 2, 3, 4, or 5 units of the 5-mer linkers. The linker region can comprise a Fc region that has been modified (e.g. mutated) to produce a heterodimer. In some embodiments, the CH3 domain of the Fc region can be mutated. Examples of such Fc regions can be found in, for example, U.S. Pat. No. 9,574,010, which is hereby incorporated by reference in its entirety. The Fc region as defined herein comprises a CH3 domain or fragment thereof, and may additionally comprise one or more addition constant region domains, or fragments thereof, including hinge, CH1, or CH2. It will be understood that the numbering of the Fc amino acid residues is that of the EU index as in Kabat et al., 1991, NIH Publication 91-3242, National Technical Information Service, Springfield, Va. The “EU index as set forth in Kabat” refers to the EU index numbering of the human IgG1 Kabat antibody. For convenience, Table B of U.S. Pat. No. 9,574,010 provides the amino acids numbered according to the EU index as set forth in Kabat of the CH2 and CH3 domain from human IgG1, which is hereby incorporated by reference. Table 1.1 of U.S. Pat. No. 9,574,010 provides mutations of variant Fc heterodimers that can be used as linker regions. Table 1.1 of U.S. Pat. No. 9,574,010 is hereby incorporated by reference.

[0293] In some embodiments, the Linker Region A comprises a first CH3 domain polypeptide and a the Linker Region B comprises a second CH3 domain polypeptide, the first and second CH3 domain polypeptides independently comprising amino acid modifications as compared to a wild-type CH3 domain polypeptide, wherein the first CH3 domain polypeptide comprises amino acid modifications at positions T350, L351, F405, and Y407, and the second CH3 domain polypeptide comprises amino acid modifications at positions T350, T366, K392 and T394, wherein the amino acid modification at position T350 is T350V, T3501, T350L or T350M; the amino acid modification at position L351 is L351Y; the amino acid modification at position F405 is F405A, F405V, F405T or F405S; the amino acid modification at position Y407 is Y407V, Y407A or Y407I; the amino acid modification at position T366 is T366L, T366I, T366V, or T366M, the amino acid modification at position K392 is K392F, K392L or K392M, and the amino acid modification at position T394 is T394W, and wherein the numbering of amino acid residues is according to the EU index as set forth in Kabat.

[0294] In some embodiments, the amino acid modification at position K392 is K392M or K392L. In some embodiments, the amino acid modification at position T350 is T350V. In some embodiments, the first CH3 domain polypeptide further comprises one or more amino acid modifications selected from Q347R and one of S400R or S400E. In some embodiments, the second CH3 domain polypeptide further comprises one or more amino acid modifications selected from L351Y, K360E, and one of N390R, N390D or N390E. In some embodiments, the first CH3 domain polypeptide further comprises one or more amino acid modifications selected from Q347R and one of S400R or S400E, and the second CH3 domain polypeptide further comprises one or more amino acid modifications selected from L351Y, K360E, and one of N390R, N390D or N390E. In some embodiments, the amino acid modification at position T350 is T350V. In some embodiments, the amino acid modification at position F405 is F405A. In some embodiments, the amino acid modification at position Y407 is Y407V. In some embodiments, the amino acid modification at position T366 is T366L or T366I. In some embodiments, the amino acid modification at position F405 is F405A, the amino acid modification at position Y407 is and Y407V, the amino acid modification at position T366 is T366L or T366I, and the amino acid modification at position K392 is K392M or K392L. In some embodiments, the first CH3 domain polypeptide comprises the amino acid modifications T350V, L351Y, S400E, F405V and Y407V, and the second CH3 domain polypeptide comprises the amino acid modifications T350V, T366L, N390R, K392M and T394W. In some embodiments, the first CH3 domain polypeptide comprises the amino acid modifications T350V, L351Y, S400E, F405T and Y407V, and the second CH3 domain polypeptide comprises the amino acid modifications T350V, T366L, N390R, K392M and T394W. In some embodiments, the first CH3 domain polypeptide comprises the amino acid modifications T350V, L351Y, S400E, F405S and Y407V, and the second CH3 domain polypeptide comprises the amino acid modifications T350V, T366L, N390R, K392M and T394W. In some embodiments, the first CH3 domain polypeptide comprises the amino acid modifications T350V, L351Y, S400E, F405A and Y407V, and the second CH3 domain polypeptide comprises the amino acid modifications T350V, L351Y, T366L, N390R, K392M and T394W. In some embodiments, the first CH3 domain polypeptide comprises the amino acid modifications Q347R, T350V, L351Y, S400E, F405A and Y407V, and the second CH3 domain polypeptide comprises the amino acid modifications T350V, K360E, T366L, N390R, K392M and T394W. In some embodiments, the first CH3 domain polypeptide comprises the amino acid modifications T350V, L351Y, S400R, F405A and Y407V, and the second CH3 domain polypeptide comprises the amino acid modifications T350V, T366L, N390D, K392M and T394W. In some embodiments, the first CH3 domain polypeptide comprises the amino acid modifications T350V, L351Y, S400R, F405A and Y407V, and the second CH3 domain polypeptide comprises the amino acid modifications T350V, T366L, N390E, K392M and T394W. In some embodiments, the first CH3 domain polypeptide comprises the amino acid modifications T350V, L351Y, S400E, F405A and Y407V, and the second CH3 domain polypeptide comprises the amino acid modifications T350V, T366L, N390R, K392L and T394W. In some embodiments, the first CH3 domain polypeptide comprises the amino acid modifications T350V, L351Y, S400E, F405A and Y407V, and the second CH3 domain polypeptide comprises the amino acid modifications T350V, T366L, N390R, K392F and T394W.

[0295] In some embodiments, an isolated heteromultimer comprising a heterodimeric CH3 domain comprising a first CH3 domain polypeptide and a second CH3 domain polypeptide, the first CH3 domain polypeptide comprising amino acid modifications at positions F405 and Y407, and the second CH3 domain polypeptide comprising amino acid modifications at positions T366 and T394, wherein: (i) the first CH3 domain polypeptide further comprises an amino acid modification at position L351, and (ii) the second CH3 domain polypeptide further comprises an amino acid modification at position K392, wherein the amino acid modification at position F405 is F405A, F405T, F405S or F405V; and the amino acid modification at position Y407 is Y407V, Y407A, Y407L or Y407I; the amino acid modification at position T394 is T394W; the amino acid modification at position L351 is L351Y; the amino acid modification at position K392 is K392L, K392M, K392V or K392F, and the amino acid modification at position T366 is T366I, T366L, T366M or T366V, wherein the heterodimeric CH3 domain has a melting temperature (Tm) of about 70.degree. C. or greater and a purity greater than about 90%, and wherein the numbering of amino acid residues is according to the EU index as set forth in Kabat.

[0296] In some embodiments, the Linker Region A comprises a first CH3 domain polypeptide and a t Linker Region B comprises a second CH3 domain polypeptide, wherein the first CH3 domain polypeptide comprising amino acid modifications at positions F405 and Y407, and the second CH3 domain polypeptide comprising amino acid modifications at positions T366 and T394, wherein: (i) the first CH3 domain polypeptide further comprises an amino acid modification at position L351, and (ii) the second CH3 domain polypeptide further comprises an amino acid modification at position K392, wherein the amino acid modification at position F405 is F405A, F405T, F405S or F405V; and the amino acid modification at position Y407 is Y407V, Y407A, Y407L or Y407I; the amino acid modification at position T394 is T394W; the amino acid modification at position L351 is L351Y; the amino acid modification at position K392 is K392L, K392M, K392V or K392F, and the amino acid modification at position T366 is T366I, T366L, T366M or T366V, wherein the heterodimeric CH3 domain has a melting temperature (Tm) of about 70 C. or greater and a purity greater than about 90%, and wherein the numbering of amino acid residues is according to the EU index as set forth in Kabat. In some embodiments, the amino acid modification at position F405 is F405A. In some embodiments, the amino acid modification at position T366 is T366I or T366L. In some embodiments, the amino acid modification at position Y407 is Y407V. In some embodiments, the amino acid modification at position F405 is F405A, the amino acid modification at position Y407 is Y407V, the amino acid modification at position T366 is T366I or T366L, and the amino acid modification at position K392 is K392L or K392M. In some embodiments, the amino acid modification at position F405 is F405A, the amino acid modification at position Y407 is Y407V, the amino acid modification at position T366 is T366L, and the amino acid modification at position K392 is K392M. In some embodiments, the amino acid modification at position F405 is F405A, the amino acid modification at position Y407 is Y407V, the amino acid modification at position T366 is T366L, and the amino acid modification at position K392 is K392L. In some embodiments, the amino acid modification at position F405 is F405A, the amino acid modification at position Y407 is Y407V, the amino acid modification at position T366 is T366I, and the amino acid modification at position K392 is K392M. In some embodiments, the amino acid modification at position F405 is F405A, the amino acid modification at position Y407 is Y407V, the amino acid modification at position T366 is T366I, and the amino acid modification at position K392 is K392L. In some embodiments, the first CH3 domain polypeptide further comprises an amino acid modification at position S400 selected from S400D and S400E, and the second CH3 domain polypeptide further comprises the amino acid modification N390R. In some embodiments, the amino acid modification at position F405 is F405A, the amino acid modification at position Y407 is Y405V, the amino acid modification at position S400 is S400E, the amino acid modification at position T366 is T366L, and the amino acid modification at position K392 is K392M.

[0297] In some embodiments, the modified first and second CH3 domains are comprised by an Fc construct based on a type G immunoglobulin (IgG). The IgG can be an IgG1, IgG2, IgG3 or IgG4.

[0298] Other Linker Region A and Linger Region B comprising variant CH3 domains are described in U.S. Pat. Nos. 9,499,634 and 9,562,109, each of which is incorporated by reference in its entirety.

[0299] A Linker Region A and Linker Region B can be complementary fragments of a protein, e.g., a naturally occurring protein such as human serum albumin. In embodiments, one of Linker Region A and Linker Region B comprises a first, e.g., an N terminal fragment of the protein, e.g., hSA, and the other comprises a second, e.g., a C terminal fragment of the protein, e.g., has. In an embodiment the fragments comprise an N terminal and a C terminal fragment. In an embodiment the fragments comprise two internal fragments. Typically the fragments do not overlap. In an embodiment the First and second fragment, together, provide the entire sequence of the original protein, e.g., hSA. The first fragment provides a N terminus and a C terminus for linking, e.g., fusing, to other sequences, e.g., sequences of R1, R2, R3, or R4 (as defined herein).

[0300] The Linker Region A and the Linker Region B can be derived from albumin polypeptide. In some embodiments, the albumin polypeptide is selected from native human serum albumin polypeptide and human alloalbumin polypeptide. The albumin polypeptide can be modified such that the Linker Region A and Linker Region B interact with one another to form heterodimers. Examples of modified albumin polypeptides are described in U.S. Pat. Nos. 9,388,231 and 9,499,605, each of which is hereby incorporated by reference in its entirety.

[0301] Accordingly, provided herein are multifunctional heteromultimer proteins of the formula R1-Linker Region A-R2 and R3-Linker Region B-R4, wherein the Linker Region A and Linker Region B form a heteromultimer. In some embodiments, the Linker Region A comprises a first polypeptide and the Linker Region B comprises a second polypeptide; wherein each of said first and second polypeptides comprises an amino acid sequence comprising a segment of an albumin polypeptide selected from native human serum albumin polypeptide and human alloalbumin polypeptide; wherein said first and second polypeptides are obtained by segmentation of said albumin polypeptide at a segmentation site, such that the segmentation results in a deletion of zero to 3 amino acid residues at the segmentation site; wherein said first polypeptide comprises at least one mutation selected from A194C, L198C, W214C, A217C, L331C and A335C, and said second polypeptide comprises at least one mutation selected from L331C, A335C, V343C, L346C, A350C, V455C, and N458C; and wherein said first and second polypeptides self-assemble to form a quasi-native structure of the monomeric form of the albumin polypeptide.

[0302] In some embodiments, the segmentation site resides on a loop of the albumin polypeptide that has a high solvent accessible surface area (SASA) and limited contact with the rest of the albumin structure, b) the segmentation results in a complementary interface between the transporter polypeptides. These segmentation sites are described, for example, in U.S. Pat. No. 9,388,231, which is hereby incorporated by reference in its entirety.

[0303] In some embodiments, the first polypeptide comprises residues 1-337 or residues 1-293 of the albumin polypeptide with one or more of the mutations described herein. In some embodiments, the second polypeptide comprises residues of 342-585 or 304-585 of the albumin polypeptide with one or more of the mutations described herein. In some embodiments, the first polypeptide comprises residues 1-339, 1-300, 1-364, 1-441, 1-83, 1-171, 1-281, 1-293, 1-114, 1-337, or 1-336 of the albumin protein. In some embodiments, the second polypeptide comprises residues 301-585, 365-585, 442-585, 85-585, 172-585, 282-585, or 115-585, 304-585, 340-585, or 342-585 of the albumin protein.

[0304] In some embodiments, the first and second polypeptide comprise the residues of the albumin protein as shown in the table below. The sequence of the albumin protein is described below.

| First Polypeptide Residues | Second Polypeptide Residues |
|---|---|
| 1-300 | 301-585 |
| 1-364 | 365-585 |
| 1-441 | 442-585 |
| 1-83 | 85-585 |
| 1-171 | 172-585 |
| 1-281 | 282-585 |
| 1-114 | 115-585 |
| 1-339 | 340-585 |
| 1-337 | 342-585 |
| 1-293 | 304-585 |
| 1-336 | 342-585 |

[0305] In some embodiments, the first and second polypeptides comprise a linker that can form a covalent bond with one another, such as a disulfide bond. A non-limiting example of the linker is a peptide linker. In some embodiments, the peptide linker comprises GGGGS (SEQ ID NO: 23). The linker can be fused to the C-terminus of the first polypeptide and the N-terminus of the second polypeptide. The linker can also be used to attach the moieties described herein without abrogating the ability of the linkers to form a disulfide bond. In some embodiments, the first and second polypeptides do not comprise a linker that can form a covalent bond. In some embodiments, the first and second polypeptides have the following substitutions.

| First Polypeptide Substitution | Second Polypeptide Substitution |
|---|---|
| A217C | V343C |
| L331C | A350C |
| A217C | L346C |
| W214C | V343C |
| A335C | L346C |
| L198C | V455C |
| A217C | A335C |
| A217C | L331C |
| L198C | N458C |
| A194C | V455C |

[0306] The sequence of the albumin polypeptide can be The sequence of human albumin is as shown, in the post-protein form with the N-terminal signaling residues removed (MKWVTFISLLFLFSSAYSRGVFRR SEQ ID NO: 1743)

DAHKSEVAHRFKDLGEENFKALVLIAFAQYLQQCPFEDHVKLVNEVTEFA
KTCVADESAENCDKSLHTLFGDKLCTVATLRETYGEMADCCAKQEPERNE
CFLQHKDDNPNLPRLVRPEVDVMCTAFHDNEETFLKKYLYEIARRHPYFY
APELLFFAKRYKAAFTECCQAADKAACLLPKLDELRDEGKASSAKQRLKC
ASLQKFGERAFKAWAVARLSQRFPKAEFAEVSKLVTDLTKVHTECCHGDL
LECADDRADLAKYICENQDSISSKLKECCEKPLLEKSHCIAEVENDEMPA
DLPSLAADEVESKDVCKNYAEAKDVELGMELYEYARRHPDYSVVLLLRLA
KTYETTLEKCCAAADPHECYAKVEDEFKPLVEEPQNLIKQNCELFEQLGE
YKFQNALLVRYTKKVPQVSTPTLVEVSRNLGKVGSKCCKHPEAKRMPCAE
DYLSVVLNQLCVLHEKTPVSDRVTKCCTESLVNRRPCFSALEVDETYVPK
EFNAETFTFHADICTLSEKERQIKKQTALVELVKHKPKATKEQLKAVMDD
FAAFVEKCCKADDKETCFAEEGKKLVAASQAALGL (human
albumin, SEQ ID NO: 42)

[0307] In some embodiments, the Linker Region A and the Linker Region B form a heterodimer as described herein.

[0308] In some embodiments, the polypeptide comprises at the N-terminus an antibody comprised of F(ab′)2 on an IgG1 Fc backbone fused with scFvs on the C-terminus of the IgG Fc backbone. In some embodiments, the IgG Fc backbone is a IgG1 Fc backbone. In some embodiments, the IgG1 backbone is replaced with a IgG4 backbone, IgG2 backbone, or other similar IgG backbone. The IgG backbones described in this paragraph can be used throughout this application where a Fc region is referred to as part of the therapeutic compound. Thus, in some embodiments, the antibody comprised of F(ab′)2 on an IgG1 Fc backbone can be an anti-MAdCAM antibody or an anti-PD-1 antibody on an IgG1 Fc or any other targeting moiety or effector binding/modulating moiety provided herein. In some embodiments, the scFV segments fused to the C-terminus could be an anti-PD-1 antibody, if the N-terminus region is an anti-MAdCAM antibody, or anti-MAdCAM antibody, if the N-terminus region is an anti-PD-1 antibody. In this non-limiting example, the N-terminus can be the targeting moiety, such as any one of the ones provided for herein, and the C-terminus can be the effector binding/modulating moiety, such as any of the ones provided for herein. Alternatively, in some embodiments, the N-terminus can be the effector binding/modulating moiety, such as any one of the ones provided for herein, and the C-terminus can be the targeting moiety, such as any of the ones provided for herein.

[0309] In some embodiments, the N-terminus can be the targeting moiety, such as any one of the ones provided for herein, and the C-terminus can be the effector binding/modulating moiety, such as any of the ones provided for herein.

[0310] In some embodiments, the therapeutic compound comprises two polypeptides that homodimerize. In some embodiments, the N-terminus of the polypeptide comprises an effector binding/modulating moiety that is fused to a human IgG1 Fc domain (e.g. CH2 and/or CH3 domains). In some embodiments, the C-terminus of the Fc domain is another linker that is fused to the targeting moiety. Thus, in some embodiments, the molecule could be represented using the formula of R1-Linker A-Fc Region-Linker B-R2, wherein R1 can be an effector binding/modulating moiety, R2 is a targeting moiety, Linker A and Linker B are independently linkers as provided for herein. In some embodiments, Linker 1 and Linker 2 are different.

[0311] In some embodiments, the molecule could be represented using the formula of R1-Linker A-Fc Region-Linker B-R2, wherein R1 can be a targeting moiety, R2 is an effector binding/modulating moiety, Linker A and Linker B are independently linkers as provided for herein. In some embodiments, Linker A and Linker B are different. The linkers can be chosen from the non-limiting examples provided for herein. In some embodiments, R1 and R2 are independently selected from F(ab′)2 and scFV antibody domains. In some embodiments, R1 and R2 are different antibody domains. In some embodiments, the scFV is in the VL-VH domain orientation.

[0312] In some embodiments, the therapeutic compound is a bispecific antibody. In some embodiments, the bispecific antibodies are comprised of four polypeptide chains comprising the following:
[0313] Chain 1: nt-VH1-CH1-CH2-CH3-Linker A-scFv[VL2-Linker B-VH2]-ct
[0314] Chain 2: nt-VH1-CH1-CH2-CH3-Linker A-scFv[VL2-Linker B-VH2]-ct
[0315] Chain 3: nt-VL1-CL-ct
[0316] Chain 4: nt-VL1-CL-ct,
[0317] wherein chains 1 and 2 are identical to each other, and chains 3 and 4 are identical to each other,
[0318] wherein chain 1 forms a homodimer with chain 2; and chain 3 and 4 associate with chain 1 and chain 2. That is, when each light chain associates with each heavy chain, VL1 associates with VH1 and CL associates with CH1 to form two functional Fab units. Without being bound to any particular theory, each scFv unit is intrinsically functional since VL2 and VH2 are covalently linked in tandem with a linker as provided herein (e.g. GGGGS (SEQ ID NO: 23), GGGGSGGGGSGGGGSGGGGS (SEQ ID NO: 22), or GGGGSGGGGSGGGGS (SEQ ID NO: 30). The sequences of Linker A and Linker B, which are independent of one another can be the same or different and as otherwise described throughout the present application. Thus, in some embodiments, Linker A comprises GGGGS (SEQ ID NO: 23), or two repeats thereof, GGGGSGGGGSGGGGS (SEQ ID NO: 30), or GGGGSGGGGSGGGGSGGGGS (SEQ ID NO: 22). In some embodiments, Linker B comprises GGGGS (SEQ ID NO: 23), or two repeats thereof, GGGGSGGGGSGGGGS (SEQ ID NO: 30), or GGGGSGGGGSGGGGSGGGGS (SEQ ID NO: 22). The scFv may be arranged in the NT-VH2-VL2-CT or NT-VL2-VH2-CT orientation. NT or nt stands for N-terminus and CT or ct stands for C-terminus of the protein. CH1, CH2, and CH3 are the domains from the IgG Fc region, and CL stands for Constant Light chain, which can be either kappa or lambda family light chains. The other definitions stand for the way they are normally used in the art.

[0319] In some embodiments, the VH1 and VL1 domains are derived from the effector molecule and the VH2 and VL2 domains are derived from the targeting moiety. In some embodiments the VH1 and VL1 domains are derived from a targeting moiety and the VH2 and VL2 domains are derived from an effector binding/modulating moiety.

[0320] In some embodiments, the VH1 and VL1 domains are derived from an anti-PD-1 antibody, and the VH2 and VL2 domains are derived from an anti-MAdCAM antibody. In some embodiments the VH1 and VL1 domains are derived from an anti-MAdCAM antibody and the VH2 and VL2 domains are derived from an anti-PD-1 antibody.

[0321] In some embodiments, Linker A comprises 1, 2, 3, 4, or 5 GGGGS (SEQ ID NO: 23) repeats (repeats disclosed as SEQ ID NO: 1749). In some embodiments, Linker B comprises 1, 2, 3, 4, or 5 GGGGS (SEQ ID NO: 23) repeats (repeats disclosed as SEQ ID NO: 1749). For the avoidance of doubt, the sequences of Linker A and Linker B, which are used throughout this application, are independent of one another. Therefore, in some embodiments, Linker A and Linker B can be the same or different. In some embodiments, Linker A comprises GGGGS (SEQ ID NO: 23), or two repeats thereof, GGGGSGGGGSGGGGS (SEQ ID NO: 30), or GGGGSGGGGSGGGGSGGGGS (SEQ ID NO: 22). In some embodiments, Linker B comprises GGGGS (SEQ ID NO: 23), or two repeats thereof, GGGGSGGGGSGGGGS (SEQ ID NO: 30), or GGGGSGGGGSGGGGSGGGGS (SEQ ID NO: 22).

[0322] In some embodiments, the therapeutic compound comprises a light chain and a heavy chain. In some embodiments, the light and heavy chain begin at the N-terminus with the VH domain of a targeting moiety followed by the CH1 domain of a human IgG1, which is fused to a Fc region (e.g. CH2-CH3) of human IgG1. In some embodiments, at the c-terminus of the Fc region is fused to a linker as provided herein, such as but not limited to, GGGGS (SEQ ID NO: 23), or two or three repeats thereof, or GGGGSGGGGSGGGGS (SEQ ID NO: 30). The linker can then be fused to an effector binding/modulating moiety, such as any one of the effector moieties provided for herein. The polypeptides can homodimerize because through the heavy chain homodimerization, which results in a therapeutic compound having two effector moieties, such as two anti-PD-1 antibodies. In this orientation, the targeting moiety is an IgG format, there are two Fab arms that each recognize binding partner of the targeting moiety, for example, MAdCAM being bound by the anti-MAdCAM targeting moiety.

[0323] In some embodiments, the therapeutic or polypeptide comprises a formula of: An antibody (targeting moiety) with a variable heavy chain and a variable light chain, in an IgG isotype, for example, with an effector molecule, such as an IL-2 mutein. In some embodiments, the IL-2 mutein is fused at the c-terminus of the variable heavy chain. This can be represented by the formula of VL and VH-IgGConstantDomain-L1-E, wherein L1 is a linker, such as a glycine/serine linker as provided herein, E is an effector molecule, such as an IL-2 mutein and VL and VH are the variable light and heavy chains. The VL domain can be a kappa domain. In some embodiments, the IgG Constant domain comprises the sequence of:

(SEQ ID NO: 44)
ASTKGPSVFPLAPSSKSTSGGTAALGCLVKDYFPEPVTVSWNSGALTSGV
HTFPAVLQSSGLYSLSSVVTVPSSSLGTQTYICNVNHKPSNTKVDKKVEP
KSCDKTHTCPPCPAPEAAGAPSVELEPPKPKDTLMISRTPEVTCVVVDVS
HEDPEVKENWYVDGVEVHNAKTKPREEQYNSTYRVVSVLTVLHQDWLNGK
EYKCKVSNKALPAPIEKTISKAKGQPREPQVYTLPPSREEMTKNQVSLTC
LVKGFYPSDIAVEWESNGQPENNYKTTPPVLDSDGSFFLYSKLTVDKSRW
QQGNVESCSVMHEALHNHYTQKSLSLSPG

In some embodiments, the linker comprises GGGGS (SEQ ID NO: 23). In some embodiments, the IL-2 mutein comprises the IL-2 muteins provided herein, such as one of SEQ ID NOs: 31-41, which can also have a Fc molecule appended to the N- or C-terminus of the IL-2 mutein. The Fc domain can comprise SEQ ID NO: 21 or 43. In some embodiments, the IL-2 mutein comprises one of SEQ ID NO: 47-60. In some embodiments, the IL-2 mutein comprises SEQ ID NO: 41 or SEQ ID NO: 56. In some embodiments, the IL-2 mutein comprises SEQ ID NO: 40 or SEQ ID NO: 55.

[0324] In some embodiments, the targeting moiety is a MAdCAM antibody.

[0325] In some embodiments, the MAdCAM antibody is selected from the following table

TABLE 6

| Clone | | | | | | | |
|---|---|---|---|---|---|---|---|
| ID | HCDR1 | HCDR2 | HCDR3 | LCDR1 | LCDR2 | LCDR3 | ScFv |
| 1. | FTES | AVIS | CTTS | QASQDI | AASSLQS | CQQGYSTPLTF | EVQLLESGGGLVQPGGSLRLSCAA |
| | SYGM | DDGS | KYYY | SKSLN | (SEQ ID | (SEQ ID NO: | SGFTFSSYGMHWVRQAPGKGLEWV |
| | H | DKYY | YYGM | (SEQ | NO: 65) | 66) | AVISDDGSDKYYADSVKGRFTISR |
| | (SEQ | A | DVW | ID NO: | | | DNSKNTLYLQMNSLRAEDTAVYYC |
| | ID | (SEQ | (SEç | 64) | | | TTSKYYYYYGMDVWGQGTTVTVSS |
| | NO: | ID | ID | | | | GGGGSGGGGSGGGGSGGGGSDIQM |
| | 61) | NO: | NO: | | | | TQSPSSLSASVGDRVTITCQASQD |
| | | 62) | 63) | | | | ISKSLNWYQQKPGKAPKLLIYAAS |
| | | | | | | | SLQSGVPSRESGSGSGTDETLTIS |
| | | | | | | | SLQPEDFATYYCQQGYSTPLTFGG |
| | | | | | | | GTKVEIK (SEQ ID NO: 67) |
| 2. | YPFI | GIIN | CARE | RASQSI | GASTLES | CQQTWGPPFTF | QVQLVQSGAEVKKPGASVKVSCKA |
| | GYYL | PSGG | GRLS | SSYLA | (SEQ ID | (SEQ ID NO: | SGYPFIGYYLHWVRQAPGQGLEWM |
| | H | STSY | YGMD | (SEQ | NO: 72) | 73) | GIINPSGGSTSYAQKFQGRVTMTR |
| | (SEQ | A | AW | ID NO: | | | DTSTSTVYMELSSLRSEDTAVYYC |
| | ID | (SEQ | (SEQ | 71) | | | AREGRLSYGMDAWGQGTLVTVSSG |
| | NO: | ID | ID | | | | GGGSGGGGSGGGGSGGGGSDIQMT |
| | 68) | NO: | NO: | | | | QSPSSLSASVGDRVTITCRASQSI |
| | | 69) | 70) | | | | SSYLAWYQQKPGKAPKLLIYGAST |
| | | | | | | | LESGVPSRFSGSGSGTDFTLTISS |
| | | | | | | | LQPEDFATYYCQQTWGPPFTFGQG |
| | | | | | | | TKLEIK (SEQ ID NO: 74) |
| 3. | YPFI | GIIN | CARE | RASQSI | GASTLES | CQQTWGPPFTF | QVQLVQSGAEVKKPGASVKVSCKA |
| | GQYL | PSGG | GRLS | SSYLA | (SEQ ID | (SEQ ID NO: | SGYPFIGQYLHWVRQAPGQGLEWM |
| | H | STSY | YGMD | (SEQ | NO: 72) | 73) | GIINPSGGSTSYAQKFQGRVTMTR |
| | (SEQ | A | AW | ID NO: | | | DTSTSTVYMELSSLRSEDTAVYYC |
| | ID | (SEQ | (SEQ | 71) | | | AREGRLSYGMDAWGQGTLVTVSSG |
| | NO: | ID | ID | | | | GGGSGGGGSGGGGSGGGGSDIQMT |
| | 75) | NO: | NO: | | | | QSPSSLSASVGDRVTITCRASQSI |
| | | 69) | 70) | | | | SSYLAWYQQKPGKAPKLLIYGAST |
| | | | | | | | LESGVPSRESGSGSGTDETLTISS |
| | | | | | | | LQPEDFATYYCQQTWGPPFTFGQG |
| | | | | | | | TKLEIK (SEQ ID NO: 76) |
| 4. | GTES | GSIN | CAKD | QASQDI | AASSLQS | CQQSYSSVITF | QVQLVQSGAEVKKPGASVKVSCKA |
| | SYAI | PSGD | KAQW | SNSLN | (SEQ ID | (SEQ ID NO: | SGGTFSSYAISWVRQAPGQGLEWM |
| | S | TTSY | LVGY | (SEQ | NO: 65) | 81) | GSINPSGDTTSYAQKFQGRVTMTR |
| | (SEQ | A | FDYW | ID NO: | | | DTSTSTVYMELSSLRSEDTAVYYC |
| | ID | (SEQ | (SEQ | 80) | | | AKDKAQWLVGYFDYWGQGTLVTVS |
| | NO: | ID | ID | | | | SGGGGSGGGGSGGGGSGGGGSDIQ |
| | 77) | NO: | NO: | | | | MTQSPSSLSASVGDRVTITCQASQ |
| | | 78) | 79) | | | | DISNSLNWYQQKPGKAPKLLIYAA |
| | | | | | | | SSLQSGVPSRFSGSGSGTDETLTI |
| | | | | | | | SSLQPEDFATYYCQQSYSSVITFG |
| | | | | | | | QGTKVEIK (SEQ ID NO: 82) |
| 5. | FTES | SSIS | CARE | RASQGI | GASSLQS | CQQANSFPFTF | EVQLLESGGGLVQPGGSLRLSCAA |
| | SYWM | PGGS | VQLS | SNSLA | (SEQ ID | (SEQ ID NO: | SGFTESSYWMHWVRQAPGKGLEWV |
| | H | NIDY | HYDY | (SEQ | NO: 87) | 88) | SSISPGGSNIDYADSVKGRFTISR |
| | (SEQ | A | W | ID NO: | | | DNSKNTLYLQMNSLRAEDTAVYYC |
| | ID | (SEQ | (SEQ | 86) | | | AREVQLSHYDYWGQGTLVTVSSGG |
| | NO: | ID | ID | | | | GGSGGGGSGGGGSGGGGSDIQMTQ |
| | 83) | NO: | NO: | | | | SPSSLSASVGDRVTITCRASQGIS |
| | | 84) | 85) | | | | NSLAWYQQKPGKAPKLLIYGASSL |
| | | | | | | | QSGVPSRFSGSGSGTDETLTISSL |
| | | | | | | | QPEDFATYYCQQANSFPFTFGQGT |
| | | | | | | | KVEIK (SEQ ID NO: 89) |
| 6. | FTFN | SRIN | CARE | RASQII | GASSLQS | CQQSYRLPFTF | EVQLLESGGGLVQPGGSLRLSCAA |
| | NYAF | SYGT | GPVA | GTNLA | (SEQ ID | (SEQ ID NO: | SGFTFNNYAFHWVRQAPGKGLEWV |
| | H | STTY | GYWY | SEQ | NO: 87) | 94) | SRINSYGTSTTYADSVKGRETISR |
| | (SEQ | A | FDLW | ID NO: | | | DNSKNTLYLQMNSLRAEDTAVYYC |
| | ID | (SEQ | (SEQ | 93) | | | AREGPVAGYWYFDLWGQGTLVTVS |
| | NO: | ID | ID | | | | SGGGGSGGGGSGGGGSGGGGSDIQ |
| | 90) | NO: | NO: | | | | MTQSPSSLSASVGDRVTITCRASQ |
| | | 91) | 92) | | | | IIGTNLAWYQQKPGKAPKLLIYGA |
| | | | | | | | SSLQSGVPSRFSGSGSGTDETLTI |
| | | | | | | | SSLQPEDFATYYCQQSYRLPFTFG |
| | | | | | | | QGTKVEIK (SEQ ID NO: 95) |
| 7. | YTFT | GIIN | CAKD | RASQNI | AASSLQS | CQQSYTTPYTF | QVQLVQSGAEVKKPGASVKVSCKA |
| | GYHI | PSGG | WSSW | SSSLN | (SEQ ID | (SEQ ID NO: | SGYTFTGYHIHWVRQAPGQGLEWM |
| | H | STIY | YLGP | (SEQ | NO: 65) | 100) | GIINPSGGSTIYAQKFQGRVTMTR |
| | (SEQ | A | FDYW | ID NO: | | | DTSTSTVYMELSSLRSEDTAVYYC |
| | ID | (SEQ | (SEQ | 99) | | | AKDWSSWYLGPFDYWGQGTLVTVS |
| | NO: | ID | ID | | | | SGGGGSGGGGSGGGGSGGGGSDIQ |
| | 96) | NO: | NO: | | | | MTQSPSSLSASVGDRVTITCRASQ |
| | | 97) | 98) | | | | NISSSLNWYQQKPGKAPKLLIYAA |
| | | | | | | | SSLQSGVPSRFSGSGSGTDETLTI |
| | | | | | | | SSLQPEDFATYYCQQSYTTPYTFG |
| | | | | | | | QGTKVEIK (SEQ ID NO: |
| | | | | | | | 101) |
| 8. | FMFG | SAIS | CAKD | RASQGI | DASSLES | CQQTHSFPSTF | EVQLLESGGGLVQPGGSLRLSCAA |
| | DYAM | GSGG | LVVA | SNNLN | (SEQ ID | (SEQ ID NO: | SGFMFGDYAMHWVRQAPGKGLEWV |
| | H | STYY | GIWY | (SEQ | NO: | 107) | SAISGSGGSTYYADSVKGRETISR |
| | (SEQ | A | FDLW | ID NO: | 106) | | DNSKNTLYLQMNSLRAEDTAVYYC |
| | ID | (SEQ | (SEQ | 105) | | | AKDLVVAGIWYFDLWGRGTLVTVS |
| | NO: | ID | ID | | | | SGGGGSGGGGSGGGGSGGGGSDIQ |
| | 102) | NO: | NO: | | | | MTQSPSSLSASVGDRVTITCRASQ |
| | | 103) | 104 | | | | GISNNLNWYQQKPGKAPKLLIYDA |
| | | | | | | | SSLESGVPSRFSGSGSGTDETLTI |
| | | | | | | | SSLQPEDFATYYCQQTHSFPSTFG |
| | | | | | | | QGTKLEIK (SEQ ID NO: |
| | | | | | | | 108) |
| 9. | FTFS | SVIG | CAAD | RASQGI | AASTLOS | CQQSYSTPWTF | EVQLLESGGGLVQPGGSLRLSCAA |
| | DYYM | ESGG | PVSR | SSSLA | (SEQ ID | (SEQ ID NO: | SGFTFSDYYMNWVRQAPGKGLEWV |
| | N | STYY | WPKH | (SEQ | NO: | 114) | SVIGESGGSTYYADSVKGRFTISR |
| | (SEQ | A | GGGD | ID NO: | 113) | | DNSKNTLYLQMNSLRAEDTAVYYC |
| | ID | (SEQ | YW | 112) | | | AADPVSRWPKHGGGDYWGQGTLVT |
| | NO: | ID | (SEQ | | | | VSSGGGGSGGGGSGGGGSGGGGSD |
| | 109) | NO: | ID | | | | IQMTQSPSSLSASVGDRVTITCRA |
| | | 110) | NO: | | | | SQGISSSLAWYQQKPGKAPKLLIY |
| | | | 111) | | | | AASTLQSGVPSRFSGSGSGTDETL |
| | | | | | | | TISSLQPEDFATYYCQQSYSTPWT |
| | | | | | | | FGQGTKVEIK (SEQ ID NO: |
| | | | | | | | 115) |
| 10. | YTLT | GWIN | CAKG | RASDNI | AASSLQS | CQQGYSTPPTF | QVQLVQSGAEVKKPGASVKVSCKA |
| | TWYM | PNRG | DLWG | GSWLA | (SEQ ID | (SEQ ID NO: | SGYTLTTWYMYWVRQAPGQGLEWM |
| | Y | ATNY | AMDV | (SEQ | NO: 65) | 120) | GWINPNRGATNYAQKFQGRVTMTR |
| | (SEQ | A | W | ID NO: | | | DTSTSTVYMELSSLRSEDTAVYYC |
| | ID | (SEQ | (SEQ | 119) | | | AKGDLWGAMDVWGQGTLVTVSSGG |
| | NO: | ID | ID | | | | GGSGGGGSGGGGSGGGGSDIQMTQ |
| | 116) | NO: | NO: | | | | SPSSLSASVGDRVTITCRASDNIG |
| | | 117) | 118 | | | | SWLAWYQQKPGKAPKLLIYAASSL |
| | | | | | | | QSGVPSRFSGSGSGTDETLTISSL |
| | | | | | | | QPEDFATYYCQQGYSTPPTFGQGT |
| | | | | | | | KVEIK (SEQ ID NO: 121) |
| 11. | YTFT | GGED | CARH | RASESI | AASTLOS | CQQSYSVPFTF | QVQLVQSGAEVKKPGASVKVSCKA |
| | TYYM | PEDG | AVAG | SNWLA | (SEQ ID | (SEQ ID NO: | SGYTFTTYYMHWVRQAPGQGLEWM |
| | H | ETIY | AVGA | (SEQ | NO: | 126) | GGFDPEDGETIYAQKFQGRVTMTR |
| | (SEç | A | GYYY | ID NO: | 113) | | DTSTSTVYMELSSLRSEDTAVYYC |
| | ID | (SEQ | YGMD | 125) | | | ARHAVAGAVGAGYYYYGMDVWGQG |
| | NO: | ID | VW | | | | TMVTVSSGGGGSGGGGSGGGGSGG |
| | 122) | NO: | (SEQ | | | | GGSDIQMTQSPSSLSASVGDRVTI |
| | | 123) | ID | | | | TCRASESISNWLAWYQQKPGKAPK |
| | | | NO: | | | | LLIYAASTLQSGVPSRFSGSGSGT |
| | | | 124) | | | | DETLTISSLQPEDFATYYCQQSYS |
| | | | | | | | VPFTFGPGTKVDIK (SEQ ID |
| | | | | | | | NO: 127) |
| 12. | YTFT | GWIG | CARD | RSSQSL | SSSNRAP | CMQALHIPLTF | QVQLVQSGAEVKKPGASVKVSCKA |
| | GYYM | PNSG | LDHN | LHSNGY | (SEQ ID | (SEQ ID NO: | SGYTFTGYYMHWVRQAPGQGLEWM |
| | H | DTNY | WYFD | NYLD | NO: | 133) | GWIGPNSGDTNYAQKFQGRVTMTR |
| | (SEQ | A | LW | (SEQ | 132) | | DTSTSTVYMELSSLRSEDTAVYYC |
| | ID | (SEQ | (SEQ | ID NO: | | | ARDLDHNWYFDLWGRGTLVTVSSG |
| | NO: | ID | ID | 131) | | | GGGSGGGGSGGGGSGGGGSDIVMT |
| | 128) | NO: | NO: | | | | QSPLSLPVTPGEPASISCRSSQSL |
| | | 129) | 130) | | | | LHSNGYNYLDWYLQKPGQSPQLLI |
| | | | | | | | YSSSNRAPGVPDRESGSGSGTDET |
| | | | | | | | LKISRVEAEDVGVYYCMQALHIPL |
| | | | | | | | TFGGGTKVEIK (SEQ ID NO: |
| | | | | | | | 134) |
| 13. | FTFD | SYID | CAKD | QASQDI | KASTLES | CQQSYSTPITF | EVQLLESGGGLVQPGGSLRLSCAA |
| | DYAM | ASGT | QAAA | SNYLN | (SEQ ID | (SEQ ID NO: | SGFTEDDYAMHWVRQAPGKGLEWV |
| | H | TIYY | GYWY | (SEQ | NO: | 140) | SYIDASGTTIYYADSVKGRFTISR |
| | (SEQ | A | FDLW | ID NO: | 139 | | DNSKNTLYLQMNSLRAEDTAVYYC |
| | ID | (SEQ | (SEQ | 138) | | | AKDQAAAGYWYFDLWGRGTLVTVS |
| | NO: | ID | ID | | | | SGGGGSGGGGSGGGGSGGGGSDIQ |
| | 135) | NO: | NO: | | | | MTQSPSSLSASVGDRVTITCQASQ |
| | | 136) | 137) | | | | DISNYLNWYQQKPGKAPKLLIYKA |
| | | | | | | | STLESGVPSRFSGSGSGTDFTLTI |
| | | | | | | | SSLQPEDFATYYCQQSYSTPITFG |
| | | | | | | | QGTRLEIK (SEQ ID NO: |
| | | | | | | | 141) |
| 14. | YTFT | GGIV | CAKD | RSSQSL | SAYNRAS | CMQALQTPLTF | QVQLVQSGAEVKKPGSSVKVSCKA |
| | DYHI | PRSG | ESSG | LHSNGY | (SEQ ID | (SEQ ID NO: | SGYTFTDYHIHWVRQAPGQGLEWM |
| | H | STTY | WYYF | NYLD | NO: | 146) | GGIVPRSGSTTYAQKFQGRVTITA |
| | (SEQ | A | DYW | (SEQ | 145) | | DESTSTAYMELSSLRSEDTAVYYC |
| | ID | (SEQ | (SEQ | ID NO: | | | AKDESSGWYYFDYWGQGTLVTVSS |
| | NO: | ID | ID | 131) | | | GGGGSGGGGSGGGGSGGGGSDIVM |
| | 142) | NO: | NO: | | | | TQSPLSLPVTPGEPASISCRSSQS |
| | | 143) | 144) | | | | LLHSNGYNYLDWYLQKPGQSPQLL |
| | | | | | | | IYSAYNRASGVPDRESGSGSGTDE |
| | | | | | | | TLKISRVEAEDVGVYYCMQALQTP |
| | | | | | | | LTFGQGTKVEIK (SEQ ID NO: |
| | | | | | | | 147) |
| 15. | YTFT | GGII | CAKG | QANQDI | RASKLEA | CQQSSEIPYSF | QVQLVQSGAEVKKPGSSVKVSCKA |
| | NYYM | PIVD | RYTV | SNYLN | (SEQ ID | (SEQ ID NO: | SGYTFTNYYMHWVRQAPGQGLEWM |
| | H | RVKY | NYYY | (SEQ | NO: | 153) | GGIIPIVDRVKYAQKFQGRVTITA |
| | (SEQ | A | GMDV | ID NO: | 152) | | DESTSTAYMELSSLRSEDTAVYYC |
| | ID | (SEQ | W | 151) | | | AKGRYTVNYYYGMDVWGQGTTVTV |
| | NO: | ID | (SEQ | | | | SSGGGGSGGGGSGGGGSGGGGSDI |
| | 148) | NO: | ID | | | | QMTQSPSSLSASVGDRVTITCQAN |
| | | 149) | NO: | | | | QDISNYLNWYQQKPGKAPKLLIYR |
| | | | 150) | | | | ASKLEAGVPSRFSGSGSGTDFTLT |
| | | | | | | | ISSLQPEDFATYYCQQSSEIPYSF |
| | | | | | | | GQGTKLEIK (SEQ ID NO: |
| | | | | | | | 154) |
| 16. | FTFE | SYLN | CAKD | RASQSI | DASNLET | CQQSYTIPITF | EVQLLESGGGLVQPGGSLRLSCAA |
| | DYAM | SDGG | YCTN | STYLN | (SEQ ID | (SEQ ID NO: | SGFTFEDYAMHWVRQAPGKGLEWV |
| | H | STSY | GVCA | (SEQ | NO: | 160) | SYLNSDGGSTSYADSVKGRFTISR |
| | (SEQ | A | FDYW | ID NO: | 159) | | DNSKNTLYLQMNSLRAEDTAVYYC |
| | ID | (SEQ | (SEQ | 158) | | | AKDYCTNGVCAFDYWGQGTLVTVS |
| | NO: | ID | ID | | | | SGGGGSGGGGSGGGGSGGGGSDIQ |
| | 155) | NO: | NO: | | | | MTQSPSSLSASVGDRVTITCRASQ |
| | | 156) | 157) | | | | SISTYLNWYQQKPGKAPKLLIYDA |
| | | | | | | | SNLETGVPSRFSGSGSGTDFTLTI |
| | | | | | | | SSLQPEDFATYYCQQSYTIPITFG |
| | | | | | | | QGTRLEIK (SEQ ID NO: |
| | | | | | | | 161) |
| 17. | FTES | SAIS | CVSD | RASQSI | AASRLEG | CQQANSFPLTF | EVQLLESGGGLVQPGGSLRLSCAA |
| | DSAM | GSGS | IAVA | STFLN | (SEQ ID | (SEQ ID NO: | SGFTFSDSAMHWVRQAPGKGLEWV |
| | H | TIYY | GHWY | (SEQ | NO: | 167) | SAISGSGSTIYYADSVKGRFTISR |
| | (SEQ | A | FDLW | ID NO: | 166) | | DNSKNTLYLQMNSLRAEDTAVYYC |
| | ID | (SEQ | (SEQ | 165) | | | VSDIAVAGHWYFDLWGRGTLVTVS |
| | NO: | ID | ID | | | | SGGGGSGGGGSGGGGSGGGGSDIQ |
| | 162) | NO: | NO: | | | | MTQSPSSLSASVGDRVTITCRASQ |
| | | 163) | 164) | | | | SISTFLNWYQQKPGKAPKLLIYAA |
| | | | | | | | SRLEGGVPSRFSGSGSGTDETLTI |
| | | | | | | | SSLQPEDFATYYCQQANSFPLTFG |
| | | | | | | | PGTKVDIK (SEQ ID NO: |
| | | | | | | | 168) |
| 18. | FTES | SYIS | CARA | RASQSI | AASSLQS | CQQSYSTPLTF | EVQLVESGGGLVKPGGSLRLSCAA |
| | SYWM | GDSG | NSSG | SSYLN | (SEQ ID | (SEQ ID NO: | SGFTFSSYWMSWVRQAPGKGLEWV |
| | S | YTNY | WYDW | (SEQ | NO: 65) | 173) | SYISGDSGYTNYAAPVKGRFTISR |
| | (SEQ | A | YFDL | ID NO: | | | DDSKNTLYLQMNSLKTEDTAVYYC |
| | ID | (SEQ | W | 172) | | | ARANSSGWYDWYFDLWGRGTLVTV |
| | NO: | ID | (SEQ | | | | SSGGGGSGGGGSGGGGSGGGGSDI |
| | 169) | NO: | ID | | | | QMTQSPSSLSASVGDRVTITCRAS |
| | | 170) | NO: | | | | QSISSYLNWYQQKPGKAPKLLIYA |
| | | | 171) | | | | ASSLQSGVPSRFSGSGSGTDFTLT |
| | | | | | | | ISSLQPEDFATYYCQQSYSTPLTF |
| | | | | | | | GGGTKVEIK (SEQ ID NO: |
| | | | | | | | 174) |
| 19. | FTED | SGIS | CAKD | QASQDI | DASNLET | CQQSYSTPLTF | EVQLLESGGGLVQPGGSLRLSCAA |
| | DYAM | WNSG | IVAA | SNYLN | (SEQ ID | (SEQ ID NO: | SGFTEDDYAMHWVRQAPGKGLEWV |
| | H | SIGY | GHYY | (SEQ | NO: | 173) | SGISWNSGSIGYADSVKGRETISR |
| | (SEQ | A | YGMD | ID NO: | 159) | | DNSKNTLYLQMNSLRAEDTAVYYC |
| | ID | (SEQ | VW | 138) | | | AKDIVAAGHYYYGMDVWGQGTTVT |
| | NO: | ID | (SEQ | | | | VSSGGGGSGGGGSGGGGSGGGGSD |
| | 135) | NO: | ID | | | | IQMTQSPSSLSASVGDRVTITCQA |
| | | 175) | NO: | | | | SQDISNYLNWYQQKPGKAPKLLIY |
| | | | 176) | | | | DASNLETGVPSRFSGSGSGTDFTL |
| | | | | | | | TISSLQPEDFATYYCQQSYSTPLT |
| | | | | | | | FGGGTKVEIK (SEQ ID NO: |
| | | | | | | | 177) |
| 20. | FTFD | SYID | CARD | QAGQDI | DASNLET | CQQTYSTPITF | EVQLLESGGGLVQPGGSLRLSCAA |
| | DYAM | TSSS | EAAA | SNYLN | (SEQ ID | (SEQ ID NO: | SGFTEDDYAMHWVRQAPGKGLEWV |
| | H | HLYY | GYYG | (SEQ | NO: | 181) | SYIDTSSSHLYYADSVKGRFTISR |
| | (SEQ | A | MDVW | ID NO: | 159) | | DNSKNTLYLQMNSLRAEDTAVYYC |
| | ID | (SEQ | (SEQ | 180) | | | ARDEAAAGYYGMDVWGQGTTVTVS |
| | NO: | ID | ID | | | | SGGGGSGGGGSGGGGSGGGGSDIQ |
| | 135) | NO: | NO: | | | | MTQSPSSLSASVGDRVTITCQAGO |
| | | 178) | 179) | | | | DISNYLNWYQQKPGKAPKLLIYDA |
| | | | | | | | SNLETGVPSRFSGSGSGTDETLTI |
| | | | | | | | SSLQPEDFATYYCQQTYSTPITFG |
| | | | | | | | QGTKLEIK (SEQ ID NO: |
| | | | | | | | 182) |
| 21. | FTFS | STIV | CARD | RASQDI | AASSLQS | CQQSYSIPPTF | EVQLLESGGGLVQPGGSLRLSCAA |
| | NAWM | GNGG | NPLR | SNYLN | (SEQ ID | (SEQ ID NO: | SGFTFSNAWMSWVRQAPGKGLEWV |
| | S | ATYY | WQGM | (SEQ | NO: 65) | 187) | STIVGNGGATYYADSVKGRETISR |
| | (SEQ | A | DVW | ID NO: | | | DNSKNTLYLQMNSLRAEDTAVYYC |
| | ID | (SEQ | (SEQ | 186) | | | ARDNPLRWQGMDVWGQGTLVTVSS |
| | NO: | ID | ID | | | | GGGGSGGGGSGGGGSGGGGSDIQM |
| | 183) | NO: | NO: | | | | TQSPSSLSASVGDRVTITCRASQD |
| | | 184) | 185) | | | | ISNYLNWYQQKPGKAPKLLIYAAS |
| | | | | | | | SLQSGVPSRFSGSGSGTDETLTIS |
| | | | | | | | SLQPEDFATYYCQQSYSIPPTFGP |
| | | | | | | | GTKVDIK (SEQ ID NO: 188) |
| 22. | FTES | SYIS | CARA | RASQSI | AASSLQS | CQQSYSTPLTF | EVQLLESGGGLVQPGGSLRLSCAA |
| | SYQM | SSST | NSSS | SSYLN | (SEQ ID | (SEQ ID NO: | SGFTFSSYQMSWVRQAPGKGLEWV |
| | S | YTNY | WYDW | SEQ | NO: 65) | 173 | SYISSSSTYTNYADSVKGRETISR |
| | (SEQ | A | YFDL | ID NO: | | | DNSKNTLYLQMNSLRAEDTAVYYC |
| | ID | (SEQ | W | 172) | | | ARANSSSWYDWYFDLWGQGTLVTV |
| | NO: | ID | (SE | | | | SSGGGGSGGGGSGGGGSGGGGSDI |
| | 189) | NO: | ID | | | | QMTQSPSSLSASVGDRVTITCRAS |
| | | 190) | NO: | | | | QSISSYLNWYQQKPGKAPKLLIYA |
| | | | 191) | | | | ASSLQSGVPSRESGSGSGTDETLT |
| | | | | | | | ISSLQPEDFATYYCQQSYSTPLTF |
| | | | | | | | GGGTKVEIK (SEQ ID NO: |
| | | | | | | | 192) |
| 23. | FTES | SGIS | CATS | RASQSI | AASNLQR | CQQSYSIPITF | EVQLLESGGGLVQPGGSLRLSCAA |
| | SYAM | GSGG | QAPV | SSWLA | (SEQ ID | (SEQ ID NO: | SGFTESSYAMHWVRQAPGKGLEWV |
| | H | SAYY | DYYY | (SEQ | NO: | 198) | SGISGSGGSAYYADSVKGRFTISR |
| | (SEQ | A | YGMD | ID NO: | 197) | | DNSKNTLYLQMNSLRAEDTAVYYC |
| | ID | (SEQ | VW | 196) | | | ATSQAPVDYYYYGMDVWGQGTTVT |
| | NO: | ID | (SEQ | | | | VSSGGGGSGGGGSGGGGSGGGGSD |
| | 193) | NO: | ID | | | | IQMTQSPSSLSASVGDRVTITCRA |
| | | 194 | NO: | | | | SQSISSWLAWYQQKPGKAPKLLIY |
| | | | 195) | | | | AASNLQRGVPSRFSGSGSGTDETL |
| | | | | | | | TISSLQPEDFATYYCQQSYSIPIT |
| | | | | | | | FGQGTKVEIK (SEQ ID NO: |
| | | | | | | | 199) |
| 24. | FTES | SYIS | CARV | RASQSI | AASSLQS | CQQSYSTPLTF | EVQLVESGGGLVKPGGSLRLSCAA |
| | SYWM | GSSS | GSSG | SSYLN | (SEQ ID | (SEQ ID NO: | SGFTFSSYWMSWVRQAPGKGLEWV |
| | S | YTNY | WYDW | (SEQ | NO: 65) | 173) | SYISGSSSYTNYAAPVKGRETISR |
| | (SEQ | A | YFDL | ID NO: | | | DDSKNTLYLQMNSLKTEDTAVYYC |
| | ID | (SEQ | W | 172) | | | ARVGSSGWYDWYFDLWGRGTLVTV |
| | NO: | ID | (SEQ | | | | SSGGGGSGGGGSGGGGSGGGGSDI |
| | 169) | NO: | ID | | | | QMTQSPSSLSASVGDRVTITCRAS |
| | | 200) | NO: | | | | QSISSYLNWYQQKPGKAPKLLIYA |
| | | | 201) | | | | ASSLQSGVPSRFSGSGSGTDETLT |
| | | | | | | | ISSLQPEDFATYYCQQSYSTPLTE |
| | | | | | | | GQGTKVEIK (SEQ ID NO: |
| | | | | | | | 202) |
| 25. | YTLT | GWIN | CAKG | RASDNI | AASSLQS | CQQGYSTPPTF | QVQLVQSGAEVKKPGASVKVSCKA |
| | TWYM | PNRG | DLWG | GSWLA | (SEQ ID | (SEQ ID NO: | SGYTLTTWYMYWVRQAPGQGLEWM |
| | Y | ATNY | AMDV | (SEQ | NO: 65) | 120) | GWINPNRGATNYAQKFQGRVTMTR |
| | (SEQ | A | W | ID NO: | | | DTSTSTVYMELSSLRSEDTAVYYC |
| | ID | (SEQ | (SEQ | 119) | | | AKGDLWGAMDVWGQGTLVTVSSGG |
| | NO: | ID | ID | | | | GGSGGGGSGGGGSGGGGSDIQMTQ |
| | 116) | NO: | NO: | | | | SPSSLSASVGDRVTITCRASDNIG |
| | | 117) | 118) | | | | SWLAWYQQKPGKAPKLLIYAASSL |
| | | | | | | | QSGVPSRESGSGSGTDETLTISSL |
| | | | | | | | QPEDFATYYCQQGYSTPPTFGQGT |
| | | | | | | | KVEIK (SEQ ID NO: 121) |
| 26. | YTLT | GWIN | CAKG | RASDNI | AASSLQS | CQQGYSTPPTF | QVQLVQSGAEVKKPGASVKVSCKA |
| | TWYM | PNRG | DLWG | GSWLA | (SEQ ID | (SEQ ID NO: | SGYTLTTWYMYWVRQAPGQGLEWM |
| | Y | ATNY | AMDV | SEQ | NO: 65) | 120) | GWINPNRGATNYAQKFQGRVTMTR |
| | (SEQ | A | W | ID NO: | | | DTSTSTVYMELSSLRSEDTAVYYC |
| | ID | (SEQ | (SEQ | 119) | | | AKGDLWGAMDVWGQGTTVTVSSGG |
| | NO: | ID | ID | | | | GGSGGGGSGGGGSGGGGSDIQMTQ |
| | 116) | NO: | NO: | | | | SPSSLSASVGDRVTITCRASDNIG |
| | | 117) | 118) | | | | SWLAWYQQKPGKAPKLLIYAASSL |
| | | | | | | | QSGVPSRFSGSGSGTDETLTISSL |
| | | | | | | | QPEDFATYYCQQGYSTPPTFGQGT |
| | | | | | | | KVEIK (SEQ ID NO: 203) |
| 27. | YTFT | GWMN | CARD | RASQSI | AASSLQS | CQQSYTAPYTF | QVQLVQSGAEVKKPGASVKVSCKA |
| | GYYI | PNSG | PGFL | SSYLH | (SEQ ID | (SEQ ID NO: | SGYTFTGYYIHWVRQAPGQGLEWM |
| | H | NTGY | GYCS | (SEQ | | | GWMNPNSGNTGYAQKFQGRVTMTR |
| | (SEQ | A | GGSC | | | | DTSTSTVYMELSSLRSEDTAVYYC |
| | ID | (SEQ | YDGW | | | | ARDPGFLGYCSGGSCYDGWFDPWG |
| | NO: | ID | | | | | QGTLVTVSSGGGGSGGGGSGGGGS |
| | 204) | NO: | FDPW | ID NO: | NO: 65) | 208) | GGGGSDIQMTQSPSSLSASVGDRV |
| | | 205) | (SEQ | 207) | | | TITCRASQSISSYLHWYQQKPGKA |
| | | | ID | | | | PKLLIYAASSLQSGVPSRESGSGS |
| | | | NO: | | | | GTDFTLTISSLQPEDFATYYCQQS |
| | | | 206) | | | | YTAPYTFGQGTKLEIK(SEQ ID |
| | | | | | | | NO: 209) |
| 28. | YTFT | GWMN | CARE | RASQGI | DASNLET | CQQSYSTPLTF | QVQLVQSGAEVKKPGASVKVSCKA |
| | DYFL | PTSG | GEGS | NSWLA | (SEQ ID | (SEQ ID NO: | SGYTFTDYFLHWVRQAPGQGLEWM |
| | H | NTGY | GFDY | (SEQ | NO: | 173) | GWMNPTSGNTGYAQKFQGRVTMTR |
| | (SEQ | A | W | ID NO: | 159) | | DTSTSTVYMELSSLRSEDTAVYYC |
| | ID | (SEQ | (SEQ | 213) | | | AREGEGSGFDYWGQGTLVTVSSGG |
| | NO: | ID | ID | | | | GGSGGGGSGGGGSGGGGSDIQMTQ |
| | 210) | NO: | NO: | | | | SPSSLSASVGDRVTITCRASQGIN |
| | | 211) | 212) | | | | SWLAWYQQKPGKAPKLLIYDASNL |
| | | | | | | | ETGVPSRFSGSGSGTDETLTISSL |
| | | | | | | | QPEDFATYYCQQSYSTPLTFGGGT |
| | | | | | | | KVEIK (SEQ ID NO: 214) |
| 29. | YTFT | AWMN | CARD | RASQGI | AASSLQS | CQQSYSTPWTF | QVQLVQSGAEVKKPGASVKVSCKA |
| | SYYM | PNSG | YDFW | SNYLA | (SEQ ID | (SEQ ID NO: | SGYTFTSYYMHWVRQAPGQGLEWM |
| | H | NTGY | SGSL | (SEQ | NO: 65) | 114) | AWMNPNSGNTGYAQKFQGRVTMTR |
| | (SEQ | A | GYW | ID NO: | | | DTSTSTVYMELSSLRSEDTAVYYC |
| | ID | (SEQ | (SEQ | 218) | | | ARDYDFWSGSLGYWGQGTLVTVSS |
| | NO: | ID | ID | | | | GGGGSGGGGSGGGGSGGGGSDIQM |
| | 215) | NO: | NO: | | | | TQSPSSLSASVGDRVTITCRASQG |
| | | 216) | 217) | | | | ISNYLAWYQQKPGKAPKLLIYAAS |
| | | | | | | | SLQSGVPSRFSGSGSGTDETLTIS |
| | | | | | | | SLQPEDFATYYCQQSYSTPWTFGQ |
| | | | | | | | GTKVEIK (SEQ ID NO: 219) |
| 30. | YTLT | GWIN | CAKG | RASDNI | AASSLQS | CQQGYSTPPTF | QVQLVQSGAEVKKPGASVKVSCKA |
| | TWYM | PNRG | DLWG | GSWLA | (SEQ ID | (SEQ ID NO: | SGYTLTTWYMYWVRQAPGQGLEWM |
| | Y | ATNY | AMDV | (SEQ | NO: 65) | 120) | GWINPNRGATNYAQKFQGRVTMTR |
| | (SEQ | A | W | ID NO: | | | DTSTSTVYMELSSLRSEDTAVYYC |
| | ID | (SEQ | (SEQ | 119) | | | AKGDLWGAMDVWGQGTLVTVSSGG |
| | NO: | ID | ID | | | | GGSGGGGSGGGGSGGGGSDIQMTQ |
| | 116) | NO: | NO: | | | | SPSSLSASVGDRVTITCRASDNIG |
| | | 117) | 118) | | | | SWLAWYQQKPGKAPKLLIYAASSL |
| | | | | | | | QSGVPSRFSGSGSGTDETLTISSL |
| | | | | | | | QPEDFATYYCQQGYSTPPTFGQGT |
| | | | | | | | KVEIK (SEQ ID NO: 121) |
| 31. | YTFT | GIIN | CARD | RASQSI | DASNLQS | CQQSYSIPITF | QVQLVQSGAEVKKPGASVKVSCKA |
| | SYYM | PSGG | TGYS | GRWLA | (SEQ ID | (SEQ ID NO: | SGYTFTSYYMHWVRQAPGQGLEWM |
| | H | STSY | YGRY | (SEQ | NO: | 198) | GIINPSGGSTSYAQKFQGRVTMTR |
| | (SEQ | A | YYYG | ID NO: | 222) | | DTSTSTVYMELSSLRSEDTAVYYC |
| | ID | (SEQ | MDVW | 221) | | | ARDTGYSYGRYYYYGMDVWGQGTL |
| | NO: | ID | (SEQ | | | | VTVSSGGGGSGGGGSGGGGSGGGG |
| | 215) | NO: | ID | | | | SDIQMTQSPSSLSASVGDRVTITC |
| | | 69) | NO: | | | | RASQSIGRWLAWYQQKPGKAPKLL |
| | | | 220) | | | | IYDASNLQSGVPSRFSGSGSGTDE |
| | | | | | | | TLTISSLQPEDFATYYCQQSYSIP |
| | | | | | | | ITFGQGTKVEIK (SEQ ID NO: |
| | | | | | | | 223) |
| 32. | YTLT | GIIN | CARE | RASQGI | AASSLQS | CQQSYSTPLTF | QVQLVQSGAEVKKPGASVKVSCKA |
| | DYYM | PSGG | EYSS | SSWLA | (SEQ ID | (SEQ ID NO: | SGYTLTDYYMHWVRQAPGQGLEWM |
| | H | STSY | SSGY | (SEQ | NO: 65) | 173) | GIINPSGGSTSYAQKFQGRVTMTR |
| | (SEQ | A | FDYW | ID NO: | | | DTSTSTVYMELSSLRSEDTAVYYC |
| | ID | (SEQ | (SEQ | 226) | | | AREEYSSSSGYFDYWGQGTLVTVS |
| | NO: | ID | ID | | | | SGGGGSGGGGSGGGGSGGGGSDIQ |
| | 224) | NO: | NO: | | | | MTQSPSSLSASVGDRVTITCRASQ |
| | | 69) | 225) | | | | GISSWLAWYQQKPGKAPKLLIYAA |
| | | | | | | | SSLQSGVPSRFSGSGSGTDETLTI |
| | | | | | | | SSLQPEDFATYYCQQSYSTPLTFG |
| | | | | | | | QGTKVEIK (SEQ ID NO: |
| | | | | | | | 227) |
| 33. | YTFT | GWMH | CARD | RASQSI | AASSLQS | CQQSYSVPITF | QVQLVQSGAEVKKPGASVKVSCKA |
| | SYGI | PKSG | TPYY | SSWLA | (SEQ ID | (SEQ ID NO: | SGYTFTSYGISWVRQAPGQGLEWM |
| | S | DTGL | YYGM | (SEQ | NO: 65) | 231) | GWMHPKSGDTGLTQKFQGRVTMTR |
| | (SEQ | T | DVW | ID NO: | | | DTSTSTVYMELSSLRSEDTAVYYC |
| | ID | (SEQ | SEQ | 196) | | | ARDTPYYYYGMDVWGQGTTVTVSS |
| | NO: | ID | ID | | | | GGGGSGGGGSGGGGSGGGGSDIQM |
| | 228) | NO: | NO: | | | | TQSPSSLSASVGDRVTITCRASQS |
| | | 229) | 230) | | | | ISSWLAWYQQKPGKAPKLLIYAAS |
| | | | | | | | SLQSGVPSRFSGSGSGTDETLTIS |
| | | | | | | | SLQPEDFATYYCQQSYSVPITFGQ |
| | | | | | | | GTKVEIK (SEQ ID NO: 232) |
| 34. | FTFG | SYIS | CARD | RASQSI | AASSLQS | CQQSYSTPLTF | EVQLVESGGGLVKPGGSLRLSCAA |
| | DYAM | GDIG | VAAT | SSYLN | (SEQ ID | (SEQ ID NO: | SGFTFGDYAMSWVRQAPGKGLEWV |
| | S | YTNY | GNWY | (SEQ | NO: 65) | 173) | SYISGDIGYTNYAAPVKGRFTISR |
| | (SEQ | A | FDLW | ID NO: | | | DDSKNTLYLQMNSLKTEDTAVYYC |
| | ID | (SEQ | (SEQ | 172) | | | ARDVAATGNWYFDLWGRGTLVTVS |
| | NO: | ID | ID | | | | SGGGGSGGGGSGGGGSGGGGSDIQ |
| | 233) | NO: | NO: | | | | MTQSPSSLSASVGDRVTITCRASQ |
| | | 234) | 235) | | | | SISSYLNWYQQKPGKAPKLLIYAA |
| | | | | | | | SSLQSGVPSRFSGSGSGTDETLTI |
| | | | | | | | SSLQPEDFATYYCQQSYSTPLTFG |
| | | | | | | | GGTKVEIK (SEQ ID NO: |
| | | | | | | | 236) |
| 35. | FSFS | SFIT | CARD | RASQSV | GASTRAT | CQQYGSSPLTF | EVQLLESGGGLVQPGGSLRLSCAA |
| | SYTM | SSSR | RRGD | RNYLA | (SEQ ID | (SEQ ID NO: | SGFSFSSYTMNWVRQAPGKGLEWV |
| | N | TIYY | YGDS | (SEQ | NO: | 242) | SFITSSSRTIYYADSVKGRFTISR |
| | (SEQ | A | WYFD | ID NO: | 241) | | DNSKNTLYLQMNSLRAEDTAVYYC |
| | ID | (SEQ | LW | 240) | | | ARDRRGDYGDSWYFDLWGRGTLVT |
| | NO: | ID | (SEQ | | | | VSSGGGGSGGGGSGGGGSGGGGSE |
| | 237) | NO: | ID | | | | IVMTQSPATLSVSPGERATLSCRA |
| | | 238) | NO: | | | | SQSVRNYLAWYQQKPGQAPRLLIY |
| | | | 239) | | | | GASTRATGIPARFSGSGSGTEFTL |
| | | | | | | | TISSLQSEDFAVYYCQQYGSSPLT |
| | | | | | | | FGGGTKVEIK (SEQ ID NO: |
| | | | | | | | 243) |
| 36. | YTFT | GIIN | CARD | RASQSI | DASNLOS | CQQSYSIPITF | QVQLVQSGAEVKKPGASVKVSCKA |
| | GHYM | PSGG | TGYS | GRWLA | (SEQ ID | (SEQ ID NO: | SGYTFTGHYMHWVRQAPGQGLEWM |
| | H | STSY | YGRY | (SEQ | NO: | 198) | GIINPSGGSTSYAQKFQGRVTMTR |
| | (SEQ | A | YYYG | ID NO: | 222) | | DTSTSTVYMELSSLRSEDTAVYYC |
| | ID | (SEQ | MDVW | 221) | | | ARDTGYSYGRYYYYGMDVWGQGTT |
| | NO: | ID | (SEQ | | | | VTVSSGGGGSGGGGSGGGGSGGGG |
| | 244) | NO: | ID | | | | SDIQMTQSPSSLSASVGDRVTITC |
| | | 69) | NO: | | | | RASQSIGRWLAWYQQKPGKAPKLL |
| | | | 220) | | | | IYDASNLQSGVPSRFSGSGSGTDF |
| | | | | | | | TLTISSLQPEDFATYYCQQSYSIP |
| | | | | | | | ITFGGGTKVEIK (SEQ ID NO: |
| | | | | | | | 245) |
| 37. | YTES | GWMN | CARG | RASQSI | AASTLOS | CQQSYSTPWTF | QVQLVQSGAEVKKPGASVKVSCKA |
| | KHFV | PNSG | EGGY | SSWLA | (SEQ ID | (SEQ ID NO: | SGYTFSKHFVHWVRQAPGQGLEWM |
| | H | NSGY | YYYG | (SEQ | NO: | 114) | GWMNPNSGNSGYAQKFQGRVTMTR |
| | (SEQ | A | MDVW | ID NO: | 113) | | DTSTSTVYMELSSLRSEDTAVYYC |
| | ID | (SEQ | (SEQ | 196) | | | ARGEGGYYYYGMDVWGQGTLVTVS |
| | NO: | ID | ID | | | | SGGGGSGGGGSGGGGSGGGGSDIQ |
| | 246) | NO: | NO: | | | | MTQSPSSLSASVGDRVTITCRASQ |
| | | 247) | 248 | | | | SISSWLAWYQQKPGKAPKLLIYAA |
| | | | | | | | STLQSGVPSRFSGSGSGTDETLTI |
| | | | | | | | SSLQPEDFATYYCQQSYSTPWTFG |
| | | | | | | | QGTKVEIK (SEQ ID NO: |
| | | | | | | | 249) |
| 38. | FTFG | SAIG | CAKG | RASQPL | AASSLQS | CQQAISFPLTF | EVQLLESGGGLVQPGGSLRLSCAA |
| | SYSM | TGGG | TPYY | SNWLA | (SEQ ID | (SEQ ID NO: | SGFTFGSYSMSWVRQAPGKGLEWV |
| | S | TYYA | YYYG | (SEQ | NO: 65) | 254) | SAIGTGGGTYYADSVKGRFTISRD |
| | (SEQ | (SEQ | MDVW | ID NO: | | | NSKNTLYLQMNSLRAEDTAVYYCA |
| | ID | ID | (SEQ | 253) | | | KGTPYYYYYGMDVWGQGTMVTVSS |
| | NO: | NO: | ID | | | | GGGGSGGGGSGGGGSGGGGSDIQM |
| | 250) | 251) | NO: | | | | TQSPSSLSASVGDRVTITCRASQP |
| | | | 252) | | | | LSNWLAWYQQKPGKAPKLLIYAAS |
| | | | | | | | SLQSGVPSRESGSGSGTDETLTIS |
| | | | | | | | SLQPEDFATYYCQQAISFPLTFGG |
| | | | | | | | GTKVEIK (SEQ ID NO: 255) |
| 39. | YTFT | GWMN | CARD | QSSEDI | AASSLQI | CQQTYSTPYTF | QVQLVQSGAEVKKPGASVKVSCKA |
| | SYYM | PNSG | LGYY | SSSLN | (SEQ ID | (SEQ ID NO: | SGYTFTSYYMHWVRQAPGQGLEWM |
| | H | NTGY | DSSG | (SEQ | NO: | 259) | GWMNPNSGNTGYAQKFQGRVTMTR |
| | (SEQ | A | YFGA | ID NO: | 258) | | DTSTSTVYMELSSLRSEDTAVYYC |
| | ID | (SEQ | FDIW | 257) | | | ARDLGYYDSSGYFGAFDIWGQGTT |
| | NO: | ID | (SEQ | | | | VTVSSGGGGSGGGGSGGGGSGGGG |
| | 215) | NO: | ID | | | | SDIQMTQSPSSLSASVGDRVTITC |
| | | 205) | NO: | | | | QSSEDISSSLNWYQQKPGKAPKLL |
| | | | 256) | | | | IYAASSLQIGVPSRFSGSGSGTDE |
| | | | | | | | TLTISSLQPEDFATYYCQQTYSTP |
| | | | | | | | YTFGQGTKVEIK (SEQ ID NO: |
| | | | | | | | 260) |
| 40. | YTFT | GIIN | CARG | RASQGI | AASNLET | CQQIHSYPLTF | QVQLVQSGAEVKKPGASVKVSCKA |
| | SYGI | PRGG | TRSS | GNWLA | (SEQ ID | (SEQ ID NO: | SGYTFTSYGISWVRQAPGOGLEWM |
| | S | STIF | GWYG | (SEQ | NO: | 265) | GIINPRGGSTIFAQKFQGRVTMTR |
| | (SEQ | A | WEDP | ID NO: | 264) | | DTSTSTVYMELSSLRSEDTAVYYC |
| | ID | (SEQ | W | 263) | | | ARGTRSSGWYGWFDPWGQGTLVTV |
| | NO: | ID | (SEQ | | | | SSGGGGSGGGGSGGGGSGGGGSDI |
| | 228) | NO: | ID | | | | QMTQSPSSLSASVGDRVTITCRAS |
| | | 261) | NO: | | | | QGIGNWLAWYQQKPGKAPKLLIYA |
| | | | 262) | | | | ASNLETGVPSRESGSGSGTDFTLT |
| | | | | | | | ISSLQPEDFATYYCQQIHSYPLTF |
| | | | | | | | GGGTKVEIK (SEQ ID NO: |
| | | | | | | | 266) |
| 41. | FTFD | SYIS | CARE | RASQSI | AASSLQS | CQQSYSTPLTF | EVQLLESGGGLVQPGGSLRLSCAA |
| | DYGM | SSSS | IAAA | SSYLN | (SEQ ID | (SEQ ID NO: | SGFTEDDYGMSWVRQAPGKGLEWV |
| | S | YIYY | GFYG | (SEQ | NO: 65) | 173) | SYISSSSSYIYYADSVKGRFTISR |
| | (SEQ | A | MDVW | ID NO: | | | DNSKNTLYLQMNSLRAEDTAVYYC |
| | ID | (SEQ | (SEQ | 172) | | | AREIAAAGFYGMDVWGQGTTVTVS |
| | NO: | ID | ID | | | | SGGGGSGGGGSGGGGSGGGGSDIQ |
| | 267) | NO: | NO: | | | | MTQSPSSLSASVGDRVTITCRASQ |
| | | 268 ) | 269) | | | | SISSYLNWYQQKPGKAPKLLIYAA |
| | | | | | | | SSLQSGVPSRESGSGSGTDFTLTI |
| | | | | | | | SSLQPEDFATYYCQQSYSTPLTFG |
| | | | | | | | GGTKVEIK (SEQ ID NO: |
| | | | | | | | 270) |
| 42. | GTLS | GGII | CARD | RASQSV | GASTRAT | CQQYGSSPITF | QVQLVQSGAEVKKPGSSVKVSCKA |
| | RYGV | PIFG | RVYY | SSSYLA | (SEQ ID | (SEQ ID NO: | SGGTLSRYGVSWVRQAPGQGLEWM |
| | S | TTNY | DSSG | (SEQ | NO: | 275) | GGIIPIFGTTNYAQKFQGRVTITA |
| | (SEQ | A | YPTW | ID NO: | 241) | | DESTSTAYMELSSLRSEDTAVYYC |
| | ID | (SEQ | YFDL | 274) | | | ARDRVYYDSSGYPTWYFDLWGRGT |
| | NO: | ID | | | | | LVTVSSGGGGSGGGGSGGGGSGGG |
| | 271) | NO: | W | | | | GSEIVMTQSPATLSVSPGERATLS |
| | | 272) | (SEQ | | | | CRASQSVSSSYLAWYQQKPGQAPR |
| | | | ID | | | | LLIYGASTRATGIPARFSGSGSGT |
| | | | NO: | | | | EFTLTISSLQSEDFAVYYCQQYGS |
| | | | 273) | | | | SPITFGQGTKVEIK (SEQ ID |
| | | | | | | | NO: 276) |
| 43. | FTFD | SGIS | CARD | QASQDI | KASTLES | CQQANSFPLTF | EVQLLESGGGLVQPGGSLRLSCAA |
| | DEAM | GNGD | ASYG | RNYLN | (SEQ ID | (SEQ ID NO: | SGFTFDDFAMHWVRQAPGKGLEWV |
| | H | SRYY | GNYG | (SEQ | NO: | 167) | SGISGNGDSRYYADSVKGRFTISR |
| | (SEQ | A | MDVW | ID NO: | 139) | | DNSKNTLYLOMNSLRAEDTAVYYC |
| | ID | (SEQ | (SEQ | 280) | | | ARDASYGGNYGMDVWGQGTTVTVS |
| | NO: | ID | ID | | | | SGGGGSGGGGSGGGGGGGGSDIQ |
| | 277) | NO: | NO: | | | | MTQSPSSLSASVGDRVTITCQASQ |
| | | 278) | 279) | | | | DIRNYLNWYQQKPGKAPKLLIYKA |
| | | | | | | | STLESGVPSRFSGSGSGTDETLTI |
| | | | | | | | SSLQPEDFATYYCQQANSFPLTFG |
| | | | | | | | PGTKVDIK (SEQ ID NO: |
| | | | | | | | 281) |
| 44. | FTES | SAIG | CARE | RASQSI | GASNLQS | CQQSYST PWTF | EVQLVESGGGLVKPGGSLRLSCAA |
| | SYWM | TGGG | WLVP | SRWLA | (SEQ ID | (SEQ ID NO: | SGFTFSSYWMSWVRQAPGKGLEWV |
| | S | TYYA | YYGM | (SEQ | NO: | 114) | SAIGTGGGTYYAAPVKGRFTISRD |
| | (SEQ | (SEQ | DVW | ID NO: | 284) | | DSKNTLYLQMNSLKTEDTAVYYCA |
| | ID | ID | (SEQ | 283) | | | REWLVPYYGMDVWGQGTTVTVSSG |
| | NO: | NO: | ID | | | | GGGSGGGGSGGGGSGGGGSDIQMT |
| | 169) | 251) | NO: | | | | QSPSSLSASVGDRVTITCRASQSI |
| | | | 282) | | | | SRWLAWYQQKPGKAPKLLIYGASN |
| | | | | | | | LQSGVPSRFSGSGSGTDFTLTISS |
| | | | | | | | LQPEDFATYYCQQSYSTPWTFGQG |
| | | | | | | | TKVEIK (SEQ ID NO: 285) |
| 45. | FSVS | AGIS | CARS | KSSQSV | WASTROS | CHQYYGHPPTF | EVQLLESGGGLVQPGGSLRLSCAA |
| | SNYM | YDGS | RGIA | LYSSNN | (SEQ ID | (SEQ ID NO: | SGFSVSSNYMSWVRQAPGKGLEWV |
| | S | SKPY | ARPL | KNYLA | NO: | 291) | AGISYDGSSKPYADSVKGRFTISR |
| | (SEQ | A | QHW | (SEQ | 290) | | DNSKNTLYLQMNSLRAEDTAVYYC |
| | ID | (SEQ | (SEQ | ID NO: | | | ARSRGIAARPLQHWGQGTLVTVSS |
| | NO: | ID | ID | 289) | | | GGGGSGGGGSGGGGSGGGGSDIVM |
| | 286) | NO: | NO: | | | | TQSPDSLAVSLGERATINCKSSQS |
| | | 287) | 288) | | | | VLYSSNNKNYLAWYQQKPGQPPKL |
| | | | | | | | LIYWASTRQSGVPDRFSGSGSGTD |
| | | | | | | | FTLTISSLQAEDVAVYYCHQYYGH |
| | | | | | | | PPTFGGGTKVEIK (SEQ ID |
| | | | | | | | NO: 292) |
| 46. | FSVS | AGIS | CARS | KSSQSV | QASTROS | CHQYYGHPPTF | EVQLLESGGGLVQPGGSLRLSCAA |
| | SNYM | YDGS | RGIA | LYSSNN | (SEQ ID | (SEQ ID NO: | SGFSVSSNYMSWVRQAPGKGLEWV |
| | S | SKPY | ARPL | KNYLA | NO: | 291) | AGISYDGSSKPYADSVKGRFTISR |
| | (SEQ | A | QHW | (SEQ | 293) | | DNSKNTLYLQMNSLRAEDTAVYYC |
| | ID | (SEQ | (SEQ | ID NO: | | | ARSRGIAARPLQHWGQGTLVTVSS |
| | NO: | ID | ID | 289) | | | GGGGSGGGGSGGGGSGGGGSDIVM |
| | 286) | NO: | NO: | | | | TQSPDSLAVSLGERATINCKSSQS |
| | | 287) | 288) | | | | VLYSSNNKNYLAWYQQKPGQPPKL |
| | | | | | | | LIYQASTROSGVPDRESGSGSGTD |
| | | | | | | | FTLTISSLQAEDVAVYYCHQYYGH |
| | | | | | | | PPTFGGGTKVEIK (SEQ ID |
| | | | | | | | NO: 294) |
| 47. | FSFS | SAIS | CARD | RASQGI | DASNLET | CQQSYSTPLTF | EVQLLESGGGLVQPGGSLRLSCAA |
| | DYGM | GSGG | GGWQ | SNNLN | (SEQ ID | (SEQ ID NO: | SGFSFSDYGMHWVRQAPGKGLEWV |
| | H | STYY | PAAI | (SEQ | NO: | 173 | SAISGSGGSTYYADSVKGRETISR |
| | (SEQ | A | LDYW | ID NO: | 159) | | DNSKNTLYLQMNSLRAEDTAVYYC |
| | ID | (SEQ | (SEQ | 105) | | | ARDGGWQPAAILDYWGQGTLVTVS |
| | NO: | ID | ID | | | | SGGGGSGGGGSGGGGSGGGGSDIQ |
| | 295) | NO: | NO: | | | | MTQSPSSLSASVGDRVTITCRASQ |
| | | 103) | 296) | | | | GISNNLNWYQQKPGKAPKLLIYDA |
| | | | | | | | SNLETGVPSRFSGSGSGTDFTLTI |
| | | | | | | | SSLQPEDFATYYCQQSYSTPLTFG |
| | | | | | | | GGTKVEIK (SEQ ID NO: |
| | | | | | | | 297) |
| 48. | FTES | SVIY | CARD | RASQGI | DASNLET | CQQSYSTCYTF | EVQLLESGGGLVQPGGSLRLSCAA |
| | DHGM | GGES | PAVA | SNYLA | (SEQ ID | (SEQ ID NO: | SGFTFSDHGMHWVRQAPGKGLEWV |
| | H | TYYA | GGGI | (SEQ | NO: | 301) | SVIYGGESTYYADSVKGRFTISRD |
| | (SEQ | (SEQ | FDYW | ID NO: | 159) | | NSKNTLYLQMNSLRAEDTAVYYCA |
| | ID | ID | (SEQ | 218) | | | RDPAVAGGGIFDYWGQGTLVTVSS |
| | NO: | NO: | ID | | | | GGGGSGGGGSGGGGSGGGGSDIQM |
| | 298) | 299) | NO: | | | | TQSPSSLSASVGDRVTITCRASQG |
| | | | 300) | | | | ISNYLAWYQQKPGKAPKLLIYDAS |
| | | | | | | | NLETGVPSRESGSGSGTDETLTIS |
| | | | | | | | SLQPEDFATYYCQQSYSTCYTFGQ |
| | | | | | | | GTKLEIK (SEQ ID NO: 302) |
| 49. | DTFT | GWIN | CARS | RASQTI | DASTLQS | CQQYSSYPLTF | QVQLVQSGAEVKKPGASVKVSCKA |
| | GYYI | PNSG | GLWL | SIWLA | (SEQ ID | (SEQ ID NO: | SGDTFTGYYIHWVRQAPGQGLEWM |
| | H | GTNY | GSYY | (SEQ | NO: | 308) | GWINPNSGGTNYAQKFQGRVTMTR |
| | (SEQ | A | GMDV | ID NO: | 307) | | DTSTSTVYMELSSLRSEDTAVYYC |
| | ID | (SEQ | W | 306) | | | ARSGLWLGSYYGMDVWGQGTLVTV |
| | NO : | ID | (SEQ | | | | SSGGGGSGGGGSGGGGSGGGGSDI |
| | 303) | NO: | ID | | | | QMTQSPSSLSASVGDRVTITCRAS |
| | | 304 | NO: | | | | QTISIWLAWYQQKPGKAPKLLIYD |
| | | | 305) | | | | ASTLQSGVPSRESGSGSGTDFTLT |
| | | | | | | | ISSLQPEDFATYYCQQYSSYPLTF |
| | | | | | | | GQGTKVEIK (SEQ ID NO: |
| | | | | | | | 309) |
| 50. | YTFT | GWIN | CARS | RASHFI | AASTLOS | CQQSYSGISF | QVQLVQSGAEVKKPGASVKVSCKA |
| | SYDI | PNSG | PYYY | SRWVA | (SEQ ID | (SEQ ID NO: | SGYTFTSYDINWVRQAPGQGLEWM |
| | N | TTGY | YGMD | (SEç | NO: | 314) | GWINPNSGTTGYAQKFQGRVTMTR |
| | (SEQ | A | VW | ID NO: | 113) | | DTSTSTVYMELSSLRSEDTAVYYC |
| | ID | (SEQ | (SEQ | 313) | | | ARSPYYYYGMDVWGQGTTVTVSSG |
| | NO: | ID | ID | | | | GGGSGGGGSGGGGSGGGGSDIQMT |
| | 310) | NO: | NO: | | | | QSPSSLSASVGDRVTITCRASHFI |
| | | 311) | 312) | | | | SRWVAWYQQKPGKAPKLLIYAAST |
| | | | | | | | LQSGVPSRFSGSGSGTDFTLTISS |
| | | | | | | | LQPEDFATYYCQQSYSGISFGPGT |
| | | | | | | | KVDIK (SEQ ID NO: 315) |
| 51. | FTEN | SRIN | CARG | RASQSV | ATSSRAS | CQQYYSGLTF | EVQLLESGGGLVQPGGSLRLSCAA |
| | NYGM | SDGS | AYYY | SGSYLA | (SEQ ID | (SEQ ID NO: | SGFTFNNYGMNWVRQAPGKGLEWV |
| | N | STSY | YYMD | (SEQ | NO: | 321) | SRINSDGSSTSYADSVKGRFTISR |
| | (SEQ | A | VW | ID NO: | 320) | | DNSKNTLYLQMNSLRAEDTAVYYC |
| | ID | (SEQ | (SEQ | 319) | | | ARGAYYYYYMDVWGQGTLVTVSSG |
| | NO: | ID | ID | | | | GGGSGGGGSGGGGSGGGGSEIVMT |
| | 316) | NO: | NO: | | | | QSPATLSVSPGERATLSCRASQSV |
| | | 317) | 318) | | | | SGSYLAWYQQKPGQAPRLLIYATS |
| | | | | | | | SRASGIPARFSGSGSGTEFTLTIS |
| | | | | | | | SLQSEDFAVYYCQQYYSGLTFGQG |
| | | | | | | | TKVEIK (SEQ ID NO: 322) |
| 52. | FTES | AHIW | CARD | RASQDI | DASSLET | CQQATSLPLTF | EVQLLESGGGLVQPGGSLRLSCAA |
| | NSDM | NDGS | RTDP | RNYLG | (SEQ ID | (SEQ ID NO: | SGFTFSNSDMNWVRQAPGKGLEWV |
| | N | QKYY | GYSS | (SEQ | NO: | 328) | AHIWNDGSQKYYADSVKGRFTISR |
| | (SEQ | A | AMDV | ID NO: | 327) | | DNSKNTLYLQMNSLRAEDTAVYYC |
| | ID | (SEQ | W | 326) | | | ARDRTDPGYSSAMDVWGQGTTVTV |
| | NO: | ID | (SEQ | | | | SSGGGGSGGGGSGGGGSGGGGSDI |
| | 323) | NO: | ID | | | | QMTQSPSSLSASVGDRVTITCRAS |
| | | 324) | NO: | | | | QDIRNYLGWYQQKPGKAPKLLIYD |
| | | | 325) | | | | ASSLETGVPSRFSGSGSGTDETLT |
| | | | | | | | ISSLQPEDFATYYCQQATSLPLTE |
| | | | | | | | GGGTKVEIK (SEQ ID NO: |
| | | | | | | | 329) |
| 53. | YTFT | GWMN | CAKD | RASQDI | QASSLES | CQQSYTIPLTF | QVQLVQSGAEVKKPGASVKVSCKA |
| | SYDI | PNSG | SDYS | TNDLG | (SEQ ID | (SEQ ID NO: | SGYTFTSYDINWVRQAPGQGLEWM |
| | N | NTGY | NLLW | (SEQ | NO: | 333) | GWMNPNSGNTGYAQKFQGRVTMTR |
| | (SEQ | A | DYW | ID NO: | 332) | | DTSTSTVYMELSSLRSEDTAVYYC |
| | ID | (SEQ | (SEQ | 331) | | | AKDSDYSNLLWDYWGQGTLVTVSS |
| | NO: | ID | ID | | | | GGGGGGGGSGGGGSGGGGSDIQM |
| | 310) | NO: | NO: | | | | TQSPSSLSASVGDRVTITCRASQD |
| | | 205) | 330) | | | | ITNDLGWYQQKPGKAPKLLIYQAS |
| | | | | | | | SLESGVPSRFSGSGSGTDETLTIS |
| | | | | | | | SLQPEDFATYYCQQSYTIPLTFGQ |
| | | | | | | | GTKVEIK (SEQ ID NO: 334) |
| 54. | FTFG | AVVS | CAKD | RASQNI | DASNLET | CQQANSFPPTF | EVQLLESGGGLVQPGGSLRLSCAA |
| | DYAM | YDGT | ICSS | NNYVN | (SEQ ID | (SEQ ID NO: | SGFTFGDYAMSWVRQAPGKGLEWV |
| | S | NKYY | TSCY | (SEQ | NO: | 338) | AVVSYDGTNKYYADSVKGRFTISR |
| | (SEQ | A | FDLW | | 159) | | DNSKNTLYLQMNSLRAEDTAVYYC |
| | ID | (SEQ | (SEQ | ID NO: | | | AKDICSSTSCYFDLWGRGTLVTVS |
| | NO: | ID | ID | 337) | | | SGGGGSGGGGSGGGGSGGGGSDIQ |
| | 233) | NO: | NO: | | | | MTQSPSSLSASVGDRVTITCRASQ |
| | | 335) | 336) | | | | NINNYVNWYQQKPGKAPKLLIYDA |
| | | | | | | | SNLETGVPSRFSGSGSGTDETLTI |
| | | | | | | | SSLQPEDFATYYCQQANSFPPTFG |
| | | | | | | | QGTRLEIK (SEQ ID NO: |
| | | | | | | | 339) |
| 55. | YTFT | GIID | CARE | RASQGI | ATSSLQT | CQQTYSIPITF | QVQLVQSGAEVKKPGASVKVSCKA |
| | SYYM | PSGG | EWSS | SSYLA | (SEQ ID | (SEQ ID NO: | SGYTFTSYYMHWVRQAPGQGLEWM |
| | H | STSY | GGVG | (SEQ | NO: | 344) | GIIDPSGGSTSYAQKFQGRVTMTR |
| | (SEQ | A | YFDY | ID NO: | 343) | | DTSTSTVYMELSSLRSEDTAVYYC |
| | ID | (SEQ | W | 342) | | | AREEWSSGGVGYFDYWGQGTLVTV |
| | NO: | ID | (SEQ | | | | SSGGGGSGGGGSGGGGSGGGGSDI |
| | 215) | NO: | ID | | | | QMTQSPSSLSASVGDRVTITCRAS |
| | | 340) | NO: | | | | QGISSYLAWYQQKPGKAPKLLIYA |
| | | | 341) | | | | TSSLQTGVPSRFSGSGSGTDETLT |
| | | | | | | | ISSLQPEDFATYYCQQTYSIPITF |
| | | | | | | | GQGTRLEIK (SEQ ID NO: |
| | | | | | | | 345) |
| 56. | FTED | SAIS | CARD | QASQDI | KASSLES | CQQANSYPVTF | EVQLLESGGGLVQPGGSLRLSCAA |
| | DYAM | GGGE | ASYG | RNYLN | (SEQ ID | (SEQ ID NO: | SGFTEDDYAMHWVRQAPGKGLEWV |
| | H | DTYY | GNYG | (SEQ | NO: | 348) | SAISGGGEDTYYADSVKGRFTISR |
| | (SEQ | A | MDVW | ID NO: | 347) | | DNSKNTLYLQMNSLRAEDTAVYYC |
| | ID | (SEQ | (SEQ | 280) | | | ARDASYGGNYGMDVWGQGTTVTVS |
| | NO: | ID | ID | | | | SGGGGSGGGGSGGGGSGGGGSDIQ |
| | 135) | NO: | NO: | | | | MTQSPSSLSASVGDRVTITCQASQ |
| | | 346) | 279) | | | | DIRNYLNWYQQKPGKAPKLLIYKA |
| | | | | | | | SSLESGVPSRESGSGSGTDETLTI |
| | | | | | | | SSLQPEDFATYYCQQANSYPVTFG |
| | | | | | | | GGTKVEIK (SEQ ID NO: |
| | | | | | | | 349) |
| 57. | YTFT | GIIN | CARD | RASQGI | AASSLQG | CQQSYSLPYTF | QVQLVQSGAEVKKPGASVKVSCKA |
| | SYYM | PSGG | SVAG | SNYFA | (SEQ ID | (SEQ ID NO: | SGYTFTSYYMHWVRQAPGQGLEWM |
| | H | STSY | TGGR | (SEQ | NO: | 353) | GIINPSGGSTSYAQKFQGRVTMTR |
| | (SEQ | A | YYGM | ID NO: | 352) | | DTSTSTVYMELSSLRSEDTAVYYC |
| | ID | (SEQ | DVW | 351) | | | ARDSVAGTGGRYYGMDVWGQGTLV |
| | NO: | ID | (SEQ | | | | TVSSGGGGSGGGGSGGGGSGGGGS |
| | 215) | NO: | ID | | | | DIQMTQSPSSLSASVGDRVTITCR |
| | | 69) | NO: | | | | ASQGISNYFAWYQQKPGKAPKLLI |
| | | | 350) | | | | YAASSLOGGVPSRESGSGSGTDET |
| | | | | | | | LTISSLQPEDFATYYCQQSYSLPY |
| | | | | | | | TFGQGTKLEIK (SEQ ID NO: |
| | | | | | | | 354) |
| 58. | YTFT | GIIN | CTTA | RASQGI | AASSLQS | CQQYYSNADF | QVQLVQSGAEVKKPGASVKVSCKA |
| | GYYM | PSGG | DYYY | SNYLA | (SEQ ID | (SEQ ID NO: | SGYTFTGYYMHWVRQAPGQGLEWM |
| | H | NTKY | YMDV | (SEQ | NO: 65) | 357) | GIINPSGGNTKYAQKFQGRVTMTR |
| | (SEQ | A | W | ID NO: | | | DTSTSTVYMELSSLRSEDTAVYYC |
| | ID | (SEQ | (SEQ | 218) | | | TTADYYYYMDVWGKGTTVTVSSGG |
| | NO: | ID | ID | | | | GGSGGGGSGGGGSGGGGSDIQMTQ |
| | 128) | NO: | NO: | | | | SPSSLSASVGDRVTITCRASQGIS |
| | | 355 | 356) | | | | NYLAWYQQKPGKAPKLLIYAASSL |
| | | | | | | | QSGVPSRFSGSGSGTDETLTISSL |
| | | | | | | | QPEDFATYYCQQYYSNADFGQGTK |
| | | | | | | | VEIK (SEQ ID NO: 358) |
| 59. | FTES | SYIS | CARD | RASQSV | SSLQS | QQYKSYPVT | EVQLLESGGGLVQPGGSLRLSCAA |
| | DFWM | GDSG | RPYY | SRSLA | (SEQ ID | (SEQ ID NO: | SGFTFSDFWMHWVRQAPGKGLEWI |
| | H | YTNY | YYMD | (SEQ | NO: | 363) | SYISGDSGYTNYADSVKGRFTISR |
| | (SEQ | A | VW | ID NO: | 362) | | DNSKNTLYLQMNSLRAEDTAVYYC |
| | ID | (SEQ | (SEQ | 361) | | | ARDRPYYYYMDVWGKGTTVTVSSG |
| | NO: | ID | ID | | | | GGGSGGGGSGGGGSGGGGSDIQMT |
| | 359) | NO: | NO: | | | | QSPSSLSASVGDRVTITCRASQSV |
| | | 170) | 360) | | | | SRSLAWYQQKPGKAPKLLIYAASS |
| | | | | | | | LQSGVPSRFSGSGSGTDFTLTISS |
| | | | | | | | LQPEDFATYYCQQYKSYPVTFGQG |
| | | | | | | | TKVEIK (SEQ ID NO: 364) |
| 60. | FTFD | SDIS | CAKD | QASQDI | SYLQS | QQAHNYPIT | EVQLLESGGGLVQPGGSLRLSCAA |
| | DYTM | GSGG | VVVA | SNYLN | (SEQ ID | (SEQ ID NO: | SGFTFDDYTMHWVRQAPGKGLEWV |
| | H | STYY | GTPL | (SEQ | NO: | 369) | SDISGSGGSTYYADSVKGRFTISR |
| | (SEQ | A | HFDY | ID NO: | 368) | | DNSKNTLYLQMNSLRAEDTAVYYC |
| | ID | (SEQ | W | 138) | | | AKDVVVAGTPLHFDYWGQGTLVTV |
| | NO: | ID | (SEQ | | | | SSGGGGSGGGGSGGGGSGGGGSDI |
| | 365) | NO: | ID | | | | QMTQSPSSLSASVGDRVTITCQAS |
| | | 366) | NO: | | | | QDISNYLNWYQQKPGKAPKLLIYA |
| | | | 367) | | | | ASYLQSGVPSRFSGSGSGTDETLT |
| | | | | | | | ISSLQPEDFATYYCQQAHNYPITF |
| | | | | | | | GQGTRLEIK (SEQ ID NO: |
| | | | | | | | 370) |
| 61. | FTFS | ASIS | CARE | RASQSI | SSLQS | QQANAFPPT | EVQLLESGGGLVQPGGSLRLSCAA |
| | NAWM | STSA | VVGA | STWLA | (SEQ ID | (SEQ ID NO: | SEFTFSNAWMSWVRQAPGKGLEWV |
| | S | YIDY | TTED | (SEQ | NO: | 374) | ASISSTSAYIDYADSVKGRETISR |
| | (SEQ | A | YW | ID NO: | 362) | | DNSKNTLYLQMNSLRAEDTAVYYC |
| | ID | (SEQ | (SEQ | 373) | | | AREVVGATTFDYWGQGTLVTVSSG |
| | NO: | ID | ID | | | | GGGSGGGGSGGGGSGGGGSDIQMT |
| | 183) | NO: | NO: | | | | QSPSSLSASVGDRVTITCRASQSI |
| | | 371) | 372) | | | | STWLAWYQQKPGKAPKLLIYAASS |
| | | | | | | | LQSGVPSRFSGSGSGTDETLTISS |
| | | | | | | | LQPEDFATYYCQQANAFPPTFGQG |
| | | | | | | | TRLEIK (SEQ ID NO: 375) |
| 62. | GTES | GWME | CAKG | KSSQSV | STRES | QQYYSTPPT | QVQLVQSGAEVKKPGSSVKVSCKA |
| | SYAI | PHTG | GFSW | LYSSNN | (SEQ ID | (SEQ ID NO: | SGGTFSSYAISWVRQAPGQGLEWM |
| | S | NTRY | FDPW | KNYLA | NO: | 379) | GWMEPHTGNTRYAQKFQGRVTITA |
| | (SEQ | A | (SEQ | (SEQ | 378) | | DESTSTAYMELSSLRSEDTAVYYC |
| | ID | (SEQ | ID | ID NO: | | | AKGGFSWFDPWGQGTLVTVSSGGG |
| | NO: | ID | NO: | 289) | | | GSGGGGSGGGGSGGGGSDIVMTQS |
| | 77) | NO: | 377) | | | | PDSLAVSLGERATINCKSSQSVLY |
| | | 376) | | | | | SSNNKNYLAWYQQKPGQPPKLLIY |
| | | | | | | | WASTRESGVPDRESGSGSGTDETL |
| | | | | | | | TISSLQAEDVAVYYCQQYYSTPPT |
| | | | | | | | FGQGTRLEIK (SEQ ID NO: |
| | | | | | | | 380) |
| 63. | FTED | ASIT | CARE | RASQGI | STRAT | QQYYTYPPT | EVQLLESGGGLVKPGGSLRLSCAA |
| | DYAM | SSSA | RVDW | SNSYLA | (SEQ ID | (SEQ ID NO: | SGFTEDDYAMHWVRQAPGKGLEWV |
| | H | FIDY | NSYF | (SEQ | NO: | 385) | ASITSSSAFIDYAASVKGRFTISR |
| | (SEQ | A | DLW | ID NO: | 384) | | DDSKNTLYLQMNSLKTEDTAVYYC |
| | ID | (SEQ | (SEQ | 383) | | | ARERVDWNSYFDLWGRGTLVTVSS |
| | NO: | ID | ID | | | | GGGGSGGGGSGGGGSGGGGSEIVM |
| | 135) | NO: | NO: | | | | TQSPATLSVSPGERATLSCRASQG |
| | | 381) | 382) | | | | ISNSYLAWYQQKPGQAPRLLIYGA |
| | | | | | | | STRATGIPARFSGSGSGTEFTLTI |
| | | | | | | | SSLQSEDFAVYYCQQYYTYPPTFG |
| | | | | | | | PGTKVDIK (SEQ ID NO: |
| | | | | | | | 386) |
| 64. | FAFS | AGTS | CARE | RASQGI | ANLEG | QQSDIFPPT | EVQLLESGGGLVKPGGSLRLSCAA |
| | SHWM | GSGE | TYYY | SNYLA | (SEQ ID | (SEQ ID NO: | SGFAFSSHWMHWVRQAPGKGLEWV |
| | H | SRDY | YYMD | SEQ | NO: | 391) | AGTSGSGESRDYADFVKGRFTISR |
| | (SEQ | A | VW | ID NO: | 390) | | DDSKNTLYLQMNSLKTEDTAVYYC |
| | ID | (SEQ | SEQ | 218) | | | ARETYYYYYMDVWGKGTTVTVSSG |
| | NO: | ID | ID | | | | GGGSGGGGSGGGGSGGGGSDIQMT |
| | 387) | NO: | NO: | | | | QSPSSLSASVGDRVTITCRASQGI |
| | | 388) | 389) | | | | SNYLAWYQQKPGKAPKLLIYDAAN |
| | | | | | | | LEGGVPSRESGSGSGTDETLTISS |
| | | | | | | | LQPEDFATYYCQQSDIFPPTFGQG |
| | | | | | | | TKVEIK (SEQ ID NO: 392) |
| 65. | YTFT | GWIN | CARE | RASQSI | SSLQS | QQSNSFPLT | QVQLVQSGAEVKKPGASVKVSCKA |
| | RHWI | VKTG | SSGW | SNYLA | (SEQ ID | (SEQ ID NO: | SGYTFTRHWIHWVRQAPGQGLEWM |
| | H | GAGY | YGTD | SEQ | NO: | 397) | GWINVKTGGAGYAQKFQGRVTMTR |
| | (SEQ | A | VW | ID NO: | 362) | | DTSTSTVYMELSSLRSEDTAVYYC |
| | ID | (SEQ | (SEQ | 396) | | | ARESSGWYGTDVWGQGTTVTVSSG |
| | NO: | ID | ID | | | | GGGSGGGGSGGGGSGGGGSDIQMT |
| | 393) | NO: | NO: | | | | QSPSSLSASVGDRATITCRASQSI |
| | | 394) | 395) | | | | SNYLAWYQQKPGKAPKLLIYAASS |
| | | | | | | | LQSGVPSRFSGSGSGTDFTLTISS |
| | | | | | | | LQPEDFATYYCQQSNSFPLTFGGG |
| | | | | | | | TKVEIK (SEQ ID NO: 398) |
| 66. | FTES | AAIS | CARE | QASQDI | NLRS | QQANSFPVT | EVQLLESGGGLVQPGGSLRLSCAA |
| | SYWM | YDGK | NKQW | SNFVN | (SEQ ID | (SEQ ID NO: | SGFTFSSYWMHWVRQAPGKGLEWV |
| | H | YKDY | LASF | (SEQ | NO: | 403) | AAISYDGKYKDYEDSVKGRETISR |
| | (SEQ | E | DYW | ID NO: | 402) | | DNSKNTLYLQMNSLRAEDTAVYYC |
| | ID | (SEQ | (SEQ | 401) | | | ARENKQWLASFDYWGQGTLVTVSS |
| | NO: | ID | ID | | | | GGGGSGGGGSGGGGSGGGGSDIQM |
| | 83) | NO: | NO: | | | | TQSPSSLSASVGDRVTITCQASQD |
| | | 399) | 400) | | | | ISNFVNWYQQKPGKAPKLLIYAAN |
| | | | | | | | LRSGVPSRFSGSGSGTDETLTISS |
| | | | | | | | LQPEDFATYYCQQANSFPVTFGPG |
| | | | | | | | TKVDIK (SEQ ID NO: 404) |

[0326] In some embodiments, the antibody comprises a CDR set as set forth in Table 6 or Table 7. In some embodiments, the antibody comprises the CDRs of Clone ID: 6, Clone ID: 59, or Clone ID: 63 of Table 6.

[0327] The antibodies, can be in a scFv format, which are also illustrated in a non-limiting embodiment in Table 6.

[0328] In some embodiments, the MAdCAM antibody is selected from the following table, which can be in a IgG format as illustrated in Table 7.

TABLE 7

| Clone | | | | | | | | |
|---|---|---|---|---|---|---|---|---|
| ID | HCDR1 | HCDR2 | HCDR3 | LCDR1 | LCDR2 | LCDR3 | VH | VK |
| 1. | FTFSSY | AVISDD | CTTSKYYYY | QASQDI | AASSL | CQQGYS | EVQLLESGGGLVQPGG | DIQMTQSPSSLSASV |
| | GMH | GSDKYY | YGMDVW | SKSLN | QS | TPLTF | SLRLSCAASGFTESSY | GDRVTITCQASQDIS |
| | (SEQ | A (SEQ | (SEQ ID | (SEQ | (SEQ | (SEQ | GMHWVRQAPGKGLEWV | KSLNWYQQKPGKAPK |
| | ID NO: | ID NO: | NO: 63) | ID NO: | ID | ID NO: | AVISDDGSDKYYADSV | LLIYAASSLQSGVPS |
| | 61) | 62) | | 64) | NO: | 66) | KGRFTISRDNSKNTLY | RFSGSGSGTDETLTI |
| | | | | | 65) | | LQMNSLRAEDTAVYYC | SSLQPEDFATYYCQQ |
| | | | | | | | TTSKYYYYYGMDVWGQ | GYSTPLTFGGGTKVE |
| | | | | | | | GTTVTVSS (SEQ ID | IK (SEQ ID NO: |
| | | | | | | | NO: 405) | 406) |
| 2. | YPFIGY | GIINPS | CAREGRLSY | RASQSI | GASTL | CQQTWG | QVQLVQSGAEVKKPGA | DIQMTQSPSSLSASV |
| | YLH | GGSTSY | GMDAW | SSYLA | ES | PPFTF | SVKVSCKASGYPFIGY | GDRVTITCRASQSIS |
| | (SEQ | A (SEQ | (SEQ ID | (SEQ | (SEQ | (SEQ | YLHWVRQAPGQGLEWM | SYLAWYQQKPGKAPK |
| | ID NO: | ID NO: | NO: 70) | ID NO: | ID | ID NO: | GIINPSGGSTSYAQKF | LLIYGASTLESGVPS |
| | 68) | 69) | | 71) | NO: | 73) | QGRVTMTRDTSTSTVY | RFSGSGSGTDETLTI |
| | | | | | 72) | | MELSSLRSEDTAVYYC | SSLQPEDFATYYCQQ |
| | | | | | | | AREGRLSYGMDAWGQG | TWGPPFTFGQGTKLE |
| | | | | | | | TLVTVSS (SEQ ID | IK (SEQ ID NO: |
| | | | | | | | NO: 407) | 408) |
| 3. | YPFIGQ | GIINPS | CAREGRLSY | RASQSI | GASTL | CQQTWG | QVQLVQSGAEVKKPGA | DIQMTQSPSSLSASV |
| | YLH | GGSTSY | GMDAW | SSYLA | ES | PPFTE | SVKVSCKASGYPFIGQ | GDRVTITCRASQSIS |
| | (SEQ | A (SEQ | (SEQ ID | (SEQ | (SEQ | (SEQ | YLHWVRQAPGQGLEWM | SYLAWYQQKPGKAPK |
| | ID NO: | ID NO: | NO: 70) | ID NO: | ID | ID NO: | GIINPSGGSTSYAQKF | LLIYGASTLESGVPS |
| | 75 | 69) | | 71) | NO: | 73) | QGRVTMTRDTSTSTVY | RFSGSGSGTDETLTI |
| | | | | | 72) | | MELSSLRSEDTAVYYC | SSLQPEDFATYYCQQ |
| | | | | | | | AREGRLSYGMDAWGQG | TWGPPFTFGQGTKLE |
| | | | | | | | TLVTVSS (SEQ ID | IK (SEQ ID NO: |
| | | | | | | | NO: 409) | 408) |
| 4. | GTFSSY | GSINPS | CAKDKAQWL | QASQDI | AASSL | CQQSYS | QVQLVQSGAEVKKPGA | DIQMTQSPSSLSASV |
| | AIS | GDTTSY | VGYFDYW | SNSLN | QS | SVITE | SVKVSCKASGGTESSY | GDRVTITCQASQDIS |
| | (SEQ | A (SEQ | (SEQ ID | (SEQ | (SEQ | (SEQ | AISWVRQAPGQGLEWM | NSLNWYQQKPGKAPK |
| | ID NO: | ID NO: | NO: 79) | ID NO: | ID | ID NO: | GSINPSGDTTSYAQKF | LLIYAASSLQSGVPS |
| | 77) | 78) | | 80) | NO: | 81) | QGRVTMTRDTSTSTVY | RFSGSGSGTDETLTI |
| | | | | | 65) | | MELSSLRSEDTAVYYC | SSLQPEDFATYYCQQ |
| | | | | | | | AKDKAQWLVGYFDYWG | SYSSVITFGQGTKVE |
| | | | | | | | QGTLVTVSS SEQ | IK (SEQ ID NO: |
| | | | | | | | ID NO: 410) | 411) |
| 5. | FTFSSY | SSISPG | CAREVQLSH | RASQGI | GASSL | CQQANS | EVQLLESGGGLVQPGG | DIQMTQSPSSLSASV |
| | WMH | GSNIDY | YDYW (SEQ | SNSLA | QS | FPFTF | SLRLSCAASGFTESSY | GDRVTITCRASQGIS |
| | (SEQ | A (SEQ | ID NO: | (SEQ | (SEQ | (SEQ | WMHWVRQAPGKGLEWV | NSLAWYQQKPGKAPK |
| | ID NO: | ID NO: | 85) | ID NO: | ID | ID NO: | SSISPGGSNIDYADSV | LLIYGASSLQSGVPS |
| | 83) | 84) | | 86) | NO: | 88) | KGRFTISRDNSKNTLY | RFSGSGSGTDFTLTI |
| | | | | | 87) | | LQMNSLRAEDTAVYYC | SSLQPEDFATYYCQQ |
| | | | | | | | AREVQLSHYDYWGQGT | ANSFPFTFGQGTKVE |
| | | | | | | | LVTVSS (SEQ ID | IK (SEQ ID NO: |
| | | | | | | | NO: 412) | 413) |
| 6. | FTENNY | SRINSY | CAREGPVAG | RASQII | GASSL | CQQSYR | EVQLLESGGGLVQPGG | DIQMTQSPSSLSASV |
| | AFH | GTSTTY | YWYFDLW | GTNLA | QS | LPFTF | SLRLSCAASGFTENNY | GDRVTITCRASQIIG |
| | (SEQ | A (SEQ | (SEQ ID | (SEQ | (SEQ | (SEQ | AFHWVRQAPGKGLEWV | TNLAWYQQKPGKAPK |
| | ID NO: | ID NO: | NO: 92) | ID NO: | ID | ID NO: | SRINSYGTSTTYADSV | LLIYGASSLQSGVPS |
| | 90) | 91) | | 93) | NO: | 94) | KGRFTISRDNSKNTLY | RFSGSGSGTDETLTI |
| | | | | | 87) | | LQMNSLRAEDTAVYYC | SSLQPEDFATYYCQQ |
| | | | | | | | AREGPVAGYWYFDLWG | SYRLPFTFGQGTKVE |
| | | | | | | | QGTLVTVSS (SEQ | IK (SEQ ID NO: |
| | | | | | | | ID NO: 414) | 415) |
| 7. | FTFSDY | AIISHA | CAKPYSSGW | RASRGI | STLQS | QQAYSF | EVQLLESGGGLVQPGG | DIQMTQSPSSLSASV |
| | QMS | DGGFKD | SAVYYFDYW | TNDLG | (SEQ | PWT | SLRLSCAASGFTESDY | GDRVTITCRASRGIT |
| | (SEQ | YA | (SEQ ID | (SEQ | ID | (SEQ | QMSWVRQAPGKGLEWV | NDLGWYQQKPGKAPK |
| | ID NO: | (SEç | NO: 418) | ID NO: | NO : | ID NO: | AIISHADGGFKDYADS | LLIYAASTLQSGVPS |
| | 416) | ID NO: | | 419) | 420) | 421) | VKGRFTISRDNSKNTL | RFSGSGSGTDETLTI |
| | | 417) | | | | | YLQMNSLRAEDTAVYY | SSLQPEDFATYYCQQ |
| | | | | | | | CAKPYSSGWSAVYYED | AYSFPWTFGQGTKVE |
| | | | | | | | YWGQGTLVTVSS | IK (SEQ ID NO: |
| | | | | | | | (SEQ ID NO: 422) | 423) |
| 8. | YTFTGY | GIINPS | CAKDWSSWY | RASQNI | AASSL | CQQSYT | QVQLVQSGAEVKKPGA | DIQMTQSPSSLSASV |
| | HIH | GGSTIY | LGPFDYW | SSSLN | QS | TPYTF | SVKVSCKASGYTFTGY | GDRVTITCRASQNIS |
| | (SEQ | A (SEQ | (SEQ ID | (SEQ | (SEQ | (SEQ | HIHWVRQAPGQGLEWM | SSLNWYQQKPGKAPK |
| | ID NO: | ID NO: | NO: 98) | ID NO: | ID | ID NO: | GIINPSGGSTIYAQKF | LLIYAASSLQSGVPS |
| | 96) | 97) | | 99) | NO: | 100) | QGRVTMTRDTSTSTVY | RFSGSGSGTDFTLTI |
| | | | | | 65) | | MELSSLRSEDTAVYYC | SSLQPEDFATYYCQQ |
| | | | | | | | AKDWSSWYLGPFDYWG | SYTTPYTFGQGTKVE |
| | | | | | | | QGTLVTVSS (SEQ | IK (SEQ ID NO: |
| | | | | | | | ID NO: 424) | 425) |
| 9. | YTFTSY | GIINHS | CARPYSGWY | RASQSI | STLQS | QQSYST | QVQLVQSGAEVKKPGA | DIQMTQSPSSLSASV |
| | YMH | GGSTSY | FAFDIW | SSSLN | (SEQ | PLT | SVKVSCKASGYTFTSY | GDRVTITCRASQSIS |
| | (SEQ | A (SEQ | (SEQ ID | (SEQ | ID | (SEQ | YMHWVRQAPGQGLEWM | SSLNWYQQKPGKAPK |
| | ID NO: | ID NO: | NO: 427) | ID NO: | NO: | ID NO: | GIINHSGGSTSYAQKF | LLIYAASTLQSGVPS |
| | 215) | 426) | | 428) | 420) | 429) | QGRVTMTRDTSTSTVY | RFSGSGSGTDETLTI |
| | | | | | | | MELSSLRSEDTAVYYC | SSLQPEDFATYYCQQ |
| | | | | | | | ARPYSGWYFAFDIWGQ | SYSTPLTFGQGTKVE |
| | | | | | | | GTLVTVSS (SEQ ID | IK (SEQ ID NO: |
| | | | | | | | NO: 430) | 431) |
| 10. | FMFGDY | SAISGS | CAKDLVVAG | RASQGI | DASSL | CQQTHS | EVQLLESGGGLVQPGG | DIQMTQSPSSLSASV |
| | AMH | GGSTYY | IWYFDLW | SNNLN | ES | FPSTF | SLRLSCAASGFMFGDY | GDRVTITCRASQGIS |
| | (SEQ | A (SEQ | (SEQ ID | (SEQ | (SEQ | (SEQ | AMHWVRQAPGKGLEWV | NNLNWYQQKPGKAPK |
| | ID NO: | ID NO: | NO: 104) | ID NO: | ID | ID NO: | SAISGSGGSTYYADSV | LLIYDASSLESGVPS |
| | 102) | 103) | | 105) | NO: | 107) | KGRFTISRDNSKNTLY | RFSGSGSGTDFTLTI |
| | | | | | 106) | | LQMNSLRAEDTAVYYC | SSLQPEDFATYYCQQ |
| | | | | | | | AKDLVVAGIWYFDLWG | THSFPSTFGQGTKLE |
| | | | | | | | RGTLVTVSS (SEQ | IK (SEQ ID NO: |
| | | | | | | | ID NO: 432) | 433) |
| 11. | FTESDY | SVIGES | CAADPVSRW | RASQGI | AASTL | CQQSYS | EVQLLESGGGLVQPGG | DIQMTQSPSSLSASV |
| | YMN | GGSTYY | PKHGGGDYW | SSSLA | QS | TPWTF | SLRLSCAASGFTESDY | GDRVTITCRASQGIS |
| | (SEQ | A (SEQ | (SEQ ID | (SEQ | (SEQ | (SEQ | YMNWVRQAPGKGLEWV | SSLAWYQQKPGKAPK |
| | ID NO: | ID NO: | NO: 111) | ID NO: | ID | ID NO: | SVIGESGGSTYYADSV | LLIYAASTLQSGVPS |
| | 109) | 110) | | 112) | NO: | 114) | KGRFTISRDNSKNTLY | RFSGSGSGTDETLTI |
| | | | | | 113) | | LQMNSLRAEDTAVYYC | SSLQPEDFATYYCQQ |
| | | | | | | | AADPVSRWPKHGGGDY | SYSTPWTFGQGTKVE |
| | | | | | | | WGQGTLVTVSS (SEQ | IK (SEQ ID NO: |
| | | | | | | | ID NO: 434) | 435) |
| 12. | YTLTTW | GWINPN | CAKGDLWGA | RASDNI | AASSL | CQQGYS | QVQLVQSGAEVKKPGA | DIQMTQSPSSLSASV |
| | YMY | RGATNY | MDVW (SEQ | GSWLA | QS | TPPTF | SVKVSCKASGYTLTTW | GDRVTITCRASDNIG |
| | (SEQ | A (SEQ | ID NO: | (SEQ | (SEQ | (SEQ | YMYWVRQAPGQGLEWM | SWLAWYQQKPGKAPK |
| | | | 118) | | ID | | GWINPNRGATNYAQKF | LLIYAASSLQSGVPS |
| | ID NO: | ID NO: | | ID NO: | NO: | ID NO: | QGRVTMTRDTSTSTVY | RFSGSGSGTDETLTI |
| | 116) | 117) | | 119) | 65) | 120) | MELSSLRSEDTAVYYC | SSLQPEDFATYYCQQ |
| | | | | | | | AKGDLWGAMDVWGQGT | GYSTPPTFGQGTKVE |
| | | | | | | | LVTVSS (SEQ ID | IK (SEQ ID NO: |
| | | | | | | | NO: 436) | 437) |
| 13. | YTFTTY | GGFDPE | CARHAVAGA | RASESI | AASTL | CQQSYS | QVQLVQSGAEVKKPGA | DIQMTQSPSSLSASV |
| | YMH | DGETIY | VGAGYYYYG | SNWLA | QS | VPFTF | SVKVSCKASGYTFTTY | GDRVTITCRASESIS |
| | (SEQ | A (SEQ | MDVW (SEQ | (SEQ | (SEQ | (SEQ | YMHWVRQAPGQGLEWM | NWLAWYQQKPGKAPK |
| | ID NO: | ID NO: | ID NO: | ID NO: | ID | ID NO: | GGFDPEDGETIYAQKE | LLIYAASTLQSGVPS |
| | 122) | 123) | 124) | 125) | NO: | 126) | QGRVTMTRDTSTSTVY | RFSGSGSGTDETLTI |
| | | | | | 113) | | MELSSLRSEDTAVYYC | SSLQPEDFATYYCQQ |
| | | | | | | | ARHAVAGAVGAGYYYY | SYSVPFTFGPGTKVD |
| | | | | | | | GMDVWGQGTMVTVSS | IK (SEQ ID NO: |
| | | | | | | | (SEQ ID NO: 438) | 439) |
| 14. | YTFTNY | GGIIPI | CAKGQFTGN | QANQDI | SKLEA | QQSSEI | QVQLVQSGAEVKKPGS | DIQMTQSPSSLSASV |
| | YMH | VDGVKY | YYYGMDYW | SNYLN | (SEQ | PYS | SVKVSCKASGYTFTNY | GDRVTITCQANODIS |
| | (SEQ | A (SEQ | (SEQ ID | (SEQ | ID | (SEQ | YMHWVRQAPGQGLEWM | NYLNWYQQKPGKAPK |
| | ID NO: | ID NO: | NO: 441) | ID NO: | NO: | ID NO: | GGIIPIVDGVKYAQKF | LLIYRASKLEAGVPS |
| | 148) | 440) | | 151) | 442) | 443) | QGRVTITADESTSTAY | RFSGSGSGTDFTLTI |
| | | | | | | | MELSSLRSEDTAVYYC | SSLQPEDFATYYCQQ |
| | | | | | | | AKGQFTGNYYYGMDYW | SSEIPYSFGQGTKVE |
| | | | | | | | GQGTLVTVSS (SEQ | IK (SEQ ID NO: |
| | | | | | | | ID NO: 444) | 445) |
| 15. | YTFTGY | GWIGPN | CARDLDHNW | RSSQSL | SSSNR | CMQALH | QVQLVQSGAEVKKPGA | DIVMTQSPLSLPVTP |
| | YMH | SGDTNY | YFDLW | LHSNGY | AP | IPLTE | SVKVSCKASGYTFTGY | GEPASISCRSSQSLL |
| | (SEQ | A (SEQ | (SEQ ID | NYLD | (SEQ | (SEQ | YMHWVRQAPGQGLEWM | HSNGYNYLDWYLQKP |
| | ID NO: | ID NO: | NO: 130) | (SEQ | ID | ID NO: | GWIGPNSGDTNYAQKF | GOSPQLLIYSSSNRA |
| | 128) | 129) | | ID NO: | NO: | 133) | QGRVTMTRDTSTSTVY | PGVPDRESGSGSGTD |
| | | | | 131) | 132) | | MELSSLRSEDTAVYYC | FTLKISRVEAEDVGV |
| | | | | | | | ARDLDHNWYFDLWGRG | YYCMQALHIPLTFGG |
| | | | | | | | TLVTVSS (SEQ ID | GTKVEIK(SEQID |
| | | | | | | | NO: 446) | NO:447) |
| 16. | FTEDDY | SYIDAS | CAKDQAAAG | QASQDI | KASTL | CQQSYS | EVQLLESGGGLVQPGG | DIQMTQSPSSLSASV |
| | AMH | GTTIYY | YWYFDLW | SNYLN | ES | TPITF | SLRLSCAASGFTEDDY | GDRVTITCQASQDIS |
| | (SEQ | A (SEQ | (SEQ ID | (SEQ | (SEQ | (SEQ | AMHWVRQAPGKGLEWV | NYLNWYQQKPGKAPK |
| | ID NO: | ID NO: | NO: 137) | ID NO: | ID | ID NO: | SYIDASGTTIYYADSV | LLIYKASTLESGVPS |
| | 135) | 136) | | 138) | NO: | 140) | KGRFTISRDNSKNTLY | RFSGSGSGTDFTLTI |
| | | | | | 139) | | LQMNSLRAEDTAVYYC | SSLQPEDFATYYCQQ |
| | | | | | | | AKDQAAAGYWYFDLWG | SYSTPITFGQGTRLE |
| | | | | | | | RGTLVTVSS (SEQ | IK (SEQ ID NO: |
| | | | | | | | ID NO: 448) | 449) |
| 17. | YTFTDY | GGIVPR | CAKDESSGW | RSSQSL | SAYNR | CMQALQ | QVQLVQSGAEVKKPGS | DIVMTQSPLSLPVTP |
| | HIH | SGSTTY | YYFDYW | LHSNGY | AS | TPLTF | SVKVSCKASGYTFTDY | GEPASISCRSSQSLL |
| | (SEQ | A (SEQ | (SEQ ID | NYLD | (SEQ | (SEQ | HIHWVRQAPGQGLEWM | HSNGYNYLDWYLQKP |
| | ID NO: | ID NO: | NO: 144) | (SEQ | ID | ID NO: | GGIVPRSGSTTYAQKF | GQSPQLLIYSAYNRA |
| | 142) | 143) | | ID NO: | NO: | 146) | QGRVTITADESTSTAY | SGVPDRFSGSGSGTD |
| | | | | 131) | 145) | | MELSSLRSEDTAVYYC | FTLKISRVEAEDVGV |
| | | | | | | | AKDESSGWYYFDYWGQ | YYCMQALQTPLTFGQ |
| | | | | | | | GTLVTVSS (SEQ ID | GTKVEIK(SEQID |
| | | | | | | | NO: 450) | NO:451) |
| 18. | YTFTNY | GGIIPI | CAKGRYTVN | QANQDI | RASKL | CQQSSE | QVQLVQSGAEVKKPGS | DIQMTQSPSSLSASV |
| | YMH | VDRVKY | YYYGMDVW | SNYLN | EA | IPYSF | SVKVSCKASGYTFTNY | GDRVTITCQANQDIS |
| | (SEQ | A (SEQ | (SEQ ID | (SEQ | (SEQ | (SEQ | YMHWVRQAPGQGLEWM | NYLNWYQQKPGKAPK |
| | ID NO: | ID NO: | NO: 150) | ID NO: | ID | ID NO: | GGIIPIVDRVKYAQKF | LLIYRASKLEAGVPS |
| | 148) | 149) | | 151) | NO: | 153) | QGRVTITADESTSTAY | RFSGSGSGTDETLTI |
| | | | | | 152) | | MELSSLRSEDTAVYYC | SSLQPEDFATYYCQQ |
| | | | | | | | AKGRYTVNYYYGMDVW | SSEIPYSFGQGTKLE |
| | | | | | | | GQGTTVTVSS (SEQ | IK (SEQ ID NO: |
| | | | | | | | ID NO: 452) | 453) |
| 19. | FTFEDY | SYLNSD | CAKDYCTNG | RASQSI | DASNL | CQQSYT | EVQLLESGGGLVQPGG | DIQMTQSPSSLSASV |
| | AMH | GGSTSY | VCAFDYW | STYLN | ET | IPITE | SLRLSCAASGFTFEDY | GDRVTITCRASQSIS |
| | (SEQ | A (SEQ | (SEQ ID | (SEQ | (SEQ | (SEQ | AMHWVRQAPGKGLEWV | TYLNWYQQKPGKAPK |
| | ID NO: | ID NO: | NO: 157) | ID NO: | ID | ID NO: | SYLNSDGGSTSYADSV | LLIYDASNLETGVPS |
| | 155) | 156) | | 158) | NO: | 160) | KGRFTISRDNSKNTLY | RFSGSGSGTDETLTI |
| | | | | | 159) | | LQMNSLRAEDTAVYYC | SSLQPEDFATYYCQQ |
| | | | | | | | AKDYCTNGVCAFDYWG | SYTIPITFGQGTRLE |
| | | | | | | | QGTLVTVSS (SEQ | IK (SEQ ID NO: |
| | | | | | | | ID NO: 454) | 455) |
| 20. | FTFSDS | SAISGS | CVSDIAVAG | RASQSI | AASRL | CQQANS | EVQLLESGGGLVQPGG | DIQMTQSPSSLSASV |
| | AMH | GSTIYY | HWYFDLW | STELN | EG | FPLTF | SLRLSCAASGFTESDS | GDRVTITCRASQSIS |
| | (SEQ | A (SEQ | (SEQ ID | (SEQ | (SEQ | (SEQ | AMHWVRQAPGKGLEWV | TFLNWYQQKPGKAPK |
| | ID NO: | ID NO: | NO: 164) | ID NO: | ID | ID NO: | SAISGSGSTIYYADSV | LLIYAASRLEGGVPS |
| | 162) | 163) | | 165) | NO: | 167) | KGRFTISRDNSKNTLY | RFSGSGSGTDETLTI |
| | | | | | 166) | | LQMNSLRAEDTAVYYC | SSLQPEDFATYYCQQ |
| | | | | | | | VSDIAVAGHWYFDLWG | ANSFPLTFGPGTKVD |
| | | | | | | | RGTLVTVSS (SEQ | IK (SEQ ID NO: |
| | | | | | | | ID NO: 456) | 457) |
| 21. | FTFSSY | SYISGD | CARANSSGW | RASQSI | AASSL | CQQSYS | EVQLVESGGGLVKPGG | DIQMTQSPSSLSASV |
| | WMS | SGYTNY | YDWYFDLW | SSYLN | QS | TPLTF | SLRLSCAASGFTESSY | GDRVTITCRASQSIS |
| | (SEQ | A (SEQ | (SEQ ID | (SEç | (SEQ | (SEQ | WMSWVRQAPGKGLEWV | SYLNWYQQKPGKAPK |
| | ID NO: | ID NO: | NO: 171) | ID NO: | ID | ID NO: | SYISGDSGYTNYAAPV | LLIYAASSLQSGVPS |
| | 169) | 170) | | 172) | NO: | 173) | KGRFTISRDDSKNTLY | RFSGSGSGTDFTLTI |
| | | | | | 65) | | LQMNSLKTEDTAVYYC | SSLQPEDFATYYCQQ |
| | | | | | | | ARANSSGWYDWYFDLW | SYSTPLTFGGGTKVE |
| | | | | | | | GRGTLVTVSS (SEQ | IK (SEQ ID NO: |
| | | | | | | | ID NO: 458) | 459) |
| 22. | FTEDDY | SGISWN | CAKDIVAAG | QASQDI | DASNL | CQQSYS | EVQLLESGGGLVQPGG | DIQMTQSPSSLSASV |
| | AMH | SGSIGY | HYYYGMDVW | SNYLN | ET | TPLTF | SLRLSCAASGFTEDDY | GDRVTITCQASQDIS |
| | (SEQ | A (SEQ | (SEQ ID | (SEQ | (SEQ | (SEQ | AMHWVRQAPGKGLEWV | NYLNWYQQKPGKAPK |
| | ID NO: | ID NO: | NO: 176) | ID NO: | ID | ID NO: | SGISWNSGSIGYADSV | LLIYDASNLETGVPS |
| | 135) | 175) | | 138) | NO: | 173) | KGRFTISRDNSKNTLY | RFSGSGSGTDFTLTI |
| | | | | | 159) | | LQMNSLRAEDTAVYYC | SSLQPEDFATYYCQQ |
| | | | | | | | AKDIVAAGHYYYGMDV | SYSTPLTFGGGTKVE |
| | | | | | | | WGQGTTVTVSS (SEQ | IK (SEQ ID NO: |
| | | | | | | | ID NO: 460) | 461) |
| 23. | FTEDDY | SYIDTS | CARDEAAAG | QAGQDI | DASNL | CQQTYS | EVQLLESGGGLVQPGG | DIQMTQSPSSLSASV |
| | AMH | SSHLYY | YYGMDVW | SNYLN | ET | TPITE | SLRLSCAASGFTEDDY | GDRVTITCQAGQDIS |
| | (SEQ | A (SEQ | (SEQ ID | (SEQ | (SEQ | (SEQ | AMHWVRQAPGKGLEWV | NYLNWYQQKPGKAPK |
| | ID NO: | ID NO: | NO: 179) | ID NO: | ID | ID NO: | SYIDTSSSHLYYADSV | LLIYDASNLETGVPS |
| | 135) | 178) | | 180) | NO: | 181) | KGRFTISRDNSKNTLY | RFSGSGSGTDETLTI |
| | | | | | 159) | | LQMNSLRAEDTAVYYC | SSLQPEDFATYYCQQ |
| | | | | | | | ARDEAAAGYYGMDVWG | TYSTPITFGQGTKLE |
| | | | | | | | QGTTVTVSS (SEQ | IK (SEQ ID NO: |
| | | | | | | | ID NO: 462) | 463) |
| 24. | FTFSSY | SRISSD | CARGTSYCT | RASQSI | SNLQS | QQSYSI | EVQLVESGGGLVKPGG | DIQMTQSPSSLSASV |
| | WMS | GRITTY | GGVCDIDYW | GRNLN | (SEQ | PLT | SLRLSCAASGFTESSY | GDRVTITCRASQSIG |
| | (SEQ | A (SEQ | (SEQ ID | (SEQ | ID | (SEQ | WMSWVRQAPGKGLEWV | RNLNWYQQKPGKAPK |
| | ID NO: | ID NO: | NO: 465) | ID NO: | NO: | ID NO: | SRISSDGRITTYAAPV | LLIYSASNLQSGVPS |
| | 169) | 464) | | 466) | 467) | 468) | KGRFTISRDDSKNTLY | RFSGSGSGTDETLTI |
| | | | | | | | LQMNSLKTEDTAVYYC | SSLQPEDFATYYCQQ |
| | | | | | | | ARGTSYCTGGVCDIDY | SYSIPLTFGPGTKVD |
| | | | | | | | WGQGTLVTVSS (SEQ | IK (SEQ ID NO: |
| | | | | | | | ID NO: 469) | 470) |
| 25. | FTFSNA | STIVGN | CARDNPLRW | RASQDI | AASSL | CQQSYS | EVQLLESGGGLVQPGG | DIQMTQSPSSLSASV |
| | WMS | GGATYY | QGMDVW | SNYLN | QS | IPPTF | SLRLSCAASGFTESNA | GDRVTITCRASQDIS |
| | (SEQ | A (SEQ | (SEQ ID | (SEQ | (SEQ | (SEQ | WMSWVRQAPGKGLEWV | NYLNWYQQKPGKAPK |
| | ID NO: | ID NO: | NO: 185) | ID NO: | ID | ID NO: | STIVGNGGATYYADSV | LLIYAASSLQSGVPS |
| | 183) | 184) | | 186) | NO: | 187) | KGRFTISRDNSKNTLY | RFSGSGSGTDETLTI |
| | | | | | 65) | | LQMNSLRAEDTAVYYC | SSLQPEDFATYYCQQ |
| | | | | | | | ARDNPLRWQGMDVWGQ | SYSIPPTFGPGTKVD |
| | | | | | | | GTLVTVSS (SEQ ID | IK (SEQ ID NO: |
| | | | | | | | NO: 471) | 472) |
| 26. | FTFSSY | SYISSS | CARANSSSW | RASQSI | SGLQS | QQSYST | EVQLLESGGGLVQPGG | DIQMTQSPSSLSASV |
| | AMS | STYTNY | YDWYFDLW | SSYLN | (SEQ | PLT | SLRLSCAASGFTESSY | GDRVTITCRASQSIS |
| | (SEQ | A (SEQ | (SEQ ID | (SEQ | ID | (SEQ | AMSWVRQAPGKGLEWV | SYLNWYQQKPGKAPK |
| | ID NO: | ID NO: | NO: 191) | ID NO: | NO: | ID NO: | SYISSSSTYTNYADSV | LLIYAASGLQSGVPS |
| | 473) | 190) | | 172) | 474) | 429) | KGRFTISRDNSKNTLY | RFSGSGSGTDETLTI |
| | | | | | | | LQMNSLRAEDTAVYYC | SSLQPEDFATYYCQQ |
| | | | | | | | ARANSSSWYDWYFDLW | SYSTPLTFGGGTKVE |
| | | | | | | | GQGTLVTVSS (SEQ | IK (SEQ ID NO: |
| | | | | | | | ID NO: 475) | 476) |
| 27. | FTESSY | SYISSS | CARANSSSW | RASQSI | SGLQS | QQSYST | EVQLLESGGGLVQPGG | DIQMTQSPSSLSASV |
| | QMS | STYTNY | YDWYFDLW | SSYLN | (SEQ | PLT | SLRLSCAASGFTESSY | GDRVTITCRASQSIS |
| | (SEQ | A (SEQ | (SEQ ID | (SEQ | ID | (SEQ | QMSWVRQAPGKGLEWV | SYLNWYQQKPGKAPK |
| | ID NO: | ID NO: | NO: 191) | ID NO: | NO: | ID NO: | SYISSSSTYTNYADSV | LLIYAASGLQSGVPS |
| | 189) | 190) | | 172) | 474) | 429) | KGRFTISRDNSKNTLY | RFSGSGSGTDETLTI |
| | | | | | | | LQMNSLRAEDTAVYYC | SSLQPEDFATYYCQQ |
| | | | | | | | ARANSSSWYDWYFDLW | SYSTPLTFGGGTKVE |
| | | | | | | | GQGTLVTVSS (SEQ | IK (SEQ ID NO: |
| | | | | | | | ID NO: 477) | 476) |
| 28. | FTFSSY | SYISSS | CARANSSSW | RASQSI | SSLQS | QQSYST | EVQLLESGGGLVQPGG | DIQMTQSPSSLSASV |
| | AMS | STYTNY | YDWYFDLW | SSYLN | (SEQ | PLT | SLRLSCAASGFTESSY | GDRVTITCRASQSIS |
| | (SEQ | A (SEQ | (SEQ ID | (SEQ | ID | (SEQ | AMSWVRQAPGKGLEWV | SYLNWYQQKPGKAPK |
| | ID NO: | ID NO: | NO: 191) | ID NO: | NO: | ID NO: | SYISSSSTYTNYADSV | LLIYAASSLQSGVPS |
| | 473) | 190) | | 172) | 362) | 429) | KGRFTISRDNSKNTLY | RFSGSGSGTDETLTI |
| | | | | | | | LQMNSLRAEDTAVYYC | SSLQPEDFATYYCQQ |
| | | | | | | | ARANSSSWYDWYFDLW | SYSTPLTFGGGTKVE |
| | | | | | | | GQGTLVTVSS (SEQ | IK (SEQ ID NO: |
| | | | | | | | ID NO: 475) | 459) |
| 29. | FTFSSY | SYISSS | CARANSSSW | RASQSI | AASSL | CQQSYS | EVQLLESGGGLVQPGG | DIQMTQSPSSLSASV |
| | QMS | STYTNY | YDWYFDLW | SSYLN | QS | TPLTF | SLRLSCAASGFTESSY | GDRVTITCRASQSIS |
| | (SEQ | A (SEQ | (SEQ ID | (SEQ | (SEQ | (SEQ | QMSWVRQAPGKGLEWV | SYLNWYQQKPGKAPK |
| | ID NO: | ID NO: | NO: 191) | ID NO: | ID | ID NO: | SYISSSSTYTNYADSV | LLIYAASSLQSGVPS |
| | 189) | 190) | | 172) | NO: | 173) | KGRFTISRDNSKNTLY | RFSGSGSGTDETLTI |
| | | | | | 65) | | LQMNSLRAEDTAVYYC | SSLQPEDFATYYCQQ |
| | | | | | | | ARANSSSWYDWYFDLW | SYSTPLTFGGGTKVE |
| | | | | | | | GQGTLVTVSS (SEQ | IK (SEQ ID NO: |
| | | | | | | | ID NO: 477) | 459) |
| 30. | FTFSSY | SGISGS | CATSQAPVD | RASQSI | AASNL | CQQSYS | EVQLLESGGGLVQPGG | DIQMTQSPSSLSASV |
| | AMH | GGSAYY | YYYYGMDVW | SSWLA | QR | IPITE | SLRLSCAASGFTESSY | GDRVTITCRASQSIS |
| | (SEQ | A (SEQ | (SEQ ID | (SEQ | (SEQ | (SEQ | AMHWVRQAPGKGLEWV | SWLAWYQQKPGKAPK |
| | ID NO: | ID NO: | NO: 195) | ID NO: | ID | ID NO: | SGISGSGGSAYYADSV | LLIYAASNLQRGVPS |
| | 193) | 194) | | 196) | NO: | 198) | KGRFTISRDNSKNTLY | RFSGSGSGTDFTLTI |
| | | | | | 197) | | LQMNSLRAEDTAVYYC | SSLQPEDFATYYCQQ |
| | | | | | | | ATSQAPVDYYYYGMDV | SYSIPITFGQGTKVE |
| | | | | | | | WGQGTTVTVSS (SEQ | IK (SEQ ID NO: |
| | | | | | | | ID NO: 478) | 479) |
| 31. | FTFSSY | SYISGS | CARVGSSGW | RASQSI | AASSL | CQQSYS | EVQLVESGGGLVKPGG | DIQMTQSPSSLSASV |
| | WMS | SSYTNY | YDWYFDLW | SSYLN | QS | TPLTF | SLRLSCAASGFTESSY | GDRVTITCRASQSIS |
| | (SEQ | A (SEQ | (SEQ ID | (SEQ | (SEQ | (SEQ | WMSWVRQAPGKGLEWV | SYLNWYQQKPGKAPK |
| | ID NO: | ID NO: | NO: 201) | ID NO: | ID | ID NO: | SYISGSSSYTNYAAPV | LLIYAASSLQSGVPS |
| | 169) | 200) | | 172) | NO: | 173) | KGRFTISRDDSKNTLY | RFSGSGSGTDFTLTI |
| | | | | | 65) | | LQMNSLKTEDTAVYYC | SSLQPEDFATYYCQQ |
| | | | | | | | ARVGSSGWYDWYFDLW | SYSTPLTFGQGTKVE |
| | | | | | | | GRGTLVTVSS (SEQ | IK (SEQ ID NO: |
| | | | | | | | ID NO: 480) | 481) |
| 32. | YTLTTW | GWINPN | CAKGDLWGA | RASDNI | AASSL | CQQGYS | QVQLVQSGAEVKKPGA | DIQMTQSPSSLSASV |
| | YMY | RGATNY | MDVW (SEQ | GSWLA | QS | TPPTE | SVKVSCKASGYTLTTW | GDRVTITCRASDNIG |
| | (SEQ | A (SEQ | ID NO: | (SEQ | (SEQ | (SEQ | YMYWVRQAPGQGLEWM | SWLAWYQQKPGKAPK |
| | ID NO: | ID NO: | 118) | ID NO: | ID | ID NO: | GWINPNRGATNYAQKF | LLIYAASSLQSGVPS |
| | 116) | 117) | | 119) | NO: | 120) | QGRVTMTRDTSTSTVY | RFSGSGSGTDFTLTI |
| | | | | | 65) | | MELSSLRSEDTAVYYC | SSLQPEDFATYYCQQ |
| | | | | | | | AKGDLWGAMDVWGQGT | GYSTPPTFGQGTKVE |
| | | | | | | | LVTVSS (SEQ ID | IK (SEQ ID NO: |
| | | | | | | | NO: 436) | 437) |
| 33. | YTLTTW | GWINPN | CAKGDLWGA | RASDNI | AASSL | CQQGYS | QVQLVQSGAEVKKPGA | DIQMTQSPSSLSASV |
| | YMY | RGATNY | MDVW (SEQ | GSWLA | QS | TPPTF | SVKVSCKASGYTLTTW | GDRVTITCRASDNIG |
| | (SEQ | A (SEQ | ID NO: | (SEQ | (SEQ | (SEQ | YMYWVRQAPGQGLEWM | SWLAWYQQKPGKAPK |
| | ID NO: | ID NO: | 118) | ID NO: | ID | ID NO: | GWINPNRGATNYAQKF | LLIYAASSLQSGVPS |
| | 116) | 117) | | 119) | NO: | 120) | QGRVTMTRDTSTSTVY | RFSGSGSGTDETLTI |
| | | | | | 65) | | MELSSLRSEDTAVYYC | SSLQPEDFATYYCQQ |
| | | | | | | | AKGDLWGAMDVWGQGT | GYSTPPTFGQGTKVE |
| | | | | | | | TVTVSS (SEQ ID | IK (SEQ ID NO: |
| | | | | | | | NO: 482) | 437) |
| 34. | YTFTGY | GWMNPN | CARDPGFLG | RASQSI | AASSL | CQQSYT | QVQLVQSGAEVKKPGA | DIQMTQSPSSLSASV |
| | YIH | SGNTGY | YCSGGSCYD | SSYLH | QS | APYTF | SVKVSCKASGYTFTGY | GDRVTITCRASQSIS |
| | (SEQ | A (SEQ | GWFDPW | (SEQ | (SEQ | (SEQ | YIHWVRQAPGQGLEWM | SYLHWYQQKPGKAPK |
| | ID NO: | ID NO: | (SEQ ID | ID NO: | ID | ID NO: | GWMNPNSGNTGYAQKF | LLIYAASSLQSGVPS |
| | 204) | 205) | NO: 206) | 207) | NO: | 208) | QGRVTMTRDTSTSTVY | RFSGSGSGTDETLTI |
| | | | | | 65) | | MELSSLRSEDTAVYYC | SSLQPEDFATYYCQQ |
| | | | | | | | ARDPGFLGYCSGGSCY | SYTAPYTFGQGTKLE |
| | | | | | | | DGWFDPWGQGTLVTVS | IK (SEQ ID NO: |
| | | | | | | | S (SEQ ID NO: | 484) |
| | | | | | | | 483) | |
| 35. | YTFTGY | GWMNPN | CARDPGFLG | RASQSI | AASSL | CQQSYT | QVQLVQSGAEVKKPGA | DIQMTQSPSSLSASV |
| | YIH | SGNTGY | YSSGGSCYD | SSYLH | QS | APYTF | SVKVSCKASGYTFTGY | GDRVTITCRASQSIS |
| | (SEQ | A (SEQ | GWFDPW | (SEQ | (SEQ | (SEQ | YIHWVRQAPGQGLEWM | SYLHWYQQKPGKAPK |
| | ID NO: | ID NO: | (SEQ ID | ID NO: | ID | ID NO: | GWMNPNSGNTGYAQKF | LLIYAASSLQSGVPS |
| | 204) | 205) | NO: 485) | 207) | NO: | 208) | QGRVTMTRDTSTSTVY | RFSGSGSGTDFTLTI |
| | | | | | 65) | | MELSSLRSEDTAVYYC | SSLQPEDFATYYCQQ |
| | | | | | | | ARDPGFLGYSSGGSSY | SYTAPYTFGQGTKLE |
| | | | | | | | DGWEDPWGQGTLVTVS | IK (SEQ ID NO: |
| | | | | | | | S (SEQ ID NO: | 484) |
| | | | | | | | 486) | |
| 36. | FTEDDY | SAISGD | CARDGTVNG | QASQDI | SNLET | QQSYSI | EVQLLESGGGLVQPGG | DIQMTQSPSSLSASV |
| | ALH | GRSTTY | ATGWFDPW | SKYLN | (SEQ | PFT | SLRLSCAASGFTEDDY | GDRVTITCQASQDIS |
| | (SEQ | A (SEQ | (SEQ ID | (SEQ | ID | (SEQ | ALHWVRQAPGKGLEWV | KYLNWYQQKPGKAPK |
| | ID NO: | ID NO: | NO: 489) | ID NO: | NO: | ID NO: | SAISGDGRSTTYADSV | LLIYDASNLETGVPS |
| | 487) | 488) | | 490) | 491) | 492) | KGRFTISRDNSKNTLY | RFSGSGSGTDETLTI |
| | | | | | | | LQMNSLRAEDTAVYYC | SSLQPEDFATYYCQQ |
| | | | | | | | ARDGTVNGATGWEDPW | SYSIPFTFGPGTKVD |
| | | | | | | | GQGTLVTVSS (SEQ | IK (SEQ ID NO: |
| | | | | | | | ID NO: 493) | 494) |
| 37. | FTESDY | SAISGS | CARDGGWQP | RASQGI | SNLET | QQSYST | EVQLLESGGGLVQPGG | DIQMTQSPSSLSASV |
| | GMP | GGSTYY | AAILDYW | SNNLN | (SEQ | PLT | SLRLSCAASGFTFSDY | GDRVTITCRASQGIS |
| | (SEQ | A (SEQ | (SEQ ID | (SEQ | ID | (SEQ | GMPWVRQAPGKGLEWV | NNLNWYQQKPGKAPK |
| | ID NO: | ID NO: | NO: 296) | ID NO: | NO: | ID NO: | SAISGSGGSTYYADSV | LLIYDASNLETGVPS |
| | 495) | 103) | | 105) | 491) | 429) | KGRFTISRDNSKNTLY | RFSGSGSGTDETLTI |
| | | | | | | | LQMNSLRAEDTAVYYC | SSLQPEDFATYYCQQ |
| | | | | | | | ARDGGWQPAAILDYWG | SYSTPLTFGQGTKVE |
| | | | | | | | QGTLVTVSS (SEQ | IK (SEQ ID NO: |
| | | | | | | | ID NO: 496) | 497) |
| 38. | YTFTDY | GWMNPT | CAREGEGSG | RASQGI | DASNL | CQQSYS | QVQLVQSGAEVKKPGA | DIQMTQSPSSLSASV |
| | FLH | SGNTGY | FDYW (SEQ | NSWLA | ET | TPLTF | SVKVSCKASGYTFTDY | GDRVTITCRASQGIN |
| | (SEQ | A (SEQ | ID NO: | (SEQ | (SEQ | (SEQ | FLHWVRQAPGQGLEWM | SWLAWYQQKPGKAPK |
| | ID NO: | ID NO: | 212) | ID NO: | ID | ID NO: | GWMNPTSGNTGYAQKF | LLIYDASNLETGVPS |
| | 210) | 211) | | 213) | NO: | 173) | QGRVTMTRDTSTSTVY | RFSGSGSGTDETLTI |
| | | | | | 159) | | MELSSLRSEDTAVYYC | SSLQPEDFATYYCQQ |
| | | | | | | | AREGEGSGFDYWGQGT | SYSTPLTFGGGTKVE |
| | | | | | | | LVTVSS (SEQ ID | IK (SEQ ID NO: |
| | | | | | | | NO: 498) | 499) |
| 39. | YTFTSY | AWMNPN | CARDYDEWS | RASQGI | AASSL | CQQSYS | QVQLVQSGAEVKKPGA | DIQMTQSPSSLSASV |
| | YMH | SGNTGY | GSLGYW | SNYLA | QS | TPWTF | SVKVSCKASGYTFTSY | GDRVTITCRASQGIS |
| | (SEQ | A (SEQ | (SEQ ID | (SEQ | (SEQ | (SEQ | YMHWVRQAPGQGLEWM | NYLAWYQQKPGKAPK |
| | ID NO: | ID NO: | NO: 217) | ID NO: | ID | ID NO: | AWMNPNSGNTGYAQKF | LLIYAASSLQSGVPS |
| | 215) | 216) | | 218) | NO: | 114) | QGRVTMTRDTSTSTVY | RFSGSGSGTDFTLTI |
| | | | | | 65) | | MELSSLRSEDTAVYYC | SSLQPEDFATYYCQQ |
| | | | | | | | ARDYDFWSGSLGYWGQ | SYSTPWTFGQGTKVE |
| | | | | | | | GTLVTVSS (SEQ ID | IK (SEQ ID NO: |
| | | | | | | | NO: 500) | 501) |
| 40. | YTLTTW | GWINPN | CAKGDLWGA | RASDNI | AASSL | CQQGYS | QVQLVQSGAEVKKPGA | DIQMTQSPSSLSASV |
| | YMY | RGATNY | MDVW (SEQ | GSWLA | QS | TPPTF | SVKVSCKASGYTLTTW | GDRVTITCRASDNIG |
| | (SEQ | A (SEQ | ID NO: | (SEQ | (SEQ | (SEQ | YMYWVRQAPGQGLEWM | SWLAWYQQKPGKAPK |
| | ID NO: | ID NO: | 118) | ID NO: | ID | ID NO: | GWINPNRGATNYAQKF | LLIYAASSLQSGVPS |
| | 116) | 117) | | 119) | NO : | 120) | QGRVTMTRDTSTSTVY | RFSGSGSGTDETLTI |
| | | | | | 65) | | MELSSLRSEDTAVYYC | SSLQPEDFATYYCQQ |
| | | | | | | | AKGDLWGAMDVWGQGT | GYSTPPTFGQGTKVE |
| | | | | | | | LVTVSS (SEQ ID | IK (SEQ ID NO: |
| | | | | | | | NO: 436) | 437) |
| 41. | YTFTSY | GIINPS | CARDTGYSY | RASQSI | DASNL | CQQSYS | QVQLVQSGAEVKKPGA | DIQMTQSPSSLSASV |
| | YMH | GGSTSY | GRYYYYGMD | GRWLA | QS | IPITE | SVKVSCKASGYTFTSY | GDRVTITCRASQSIG |
| | (SEQ | A (SEQ | VW (SEQ | (SEQ | (SEQ | (SEQ | YMHWVRQAPGQGLEWM | RWLAWYQQKPGKAPK |
| | ID NO: | ID NO: | ID NO: | ID NO: | ID | ID NO: | GIINPSGGSTSYAQKF | LLIYDASNLQSGVPS |
| | 215) | 69) | 220) | 221) | NO: | 198) | QGRVTMTRDTSTSTVY | RFSGSGSGTDETLTI |
| | | | | | 222) | | MELSSLRSEDTAVYYC | SSLQPEDFATYYCQQ |
| | | | | | | | ARDTGYSYGRYYYYGM | SYSIPITFGQGTKVE |
| | | | | | | | DVWGQGTLVTVSS | IK (SEQ ID NO: |
| | | | | | | | (SEQ ID NO: 502) | 503) |
| 42. | YTLTDY | GIINPS | CAREEYSSS | RASQGI | AASSL | CQQSYS | QVQLVQSGAEVKKPGA | DIQMTQSPSSLSASV |
| | YMH | GGSTSY | SGYFDYW | SSWLA | QS | TPLTF | SVKVSCKASGYTLTDY | GDRVTITCRASQGIS |
| | (SEQ | A (SEQ | (SEQ ID | (SEQ | (SEQ | (SEQ | YMHWVRQAPGQGLEWM | SWLAWYQQKPGKAPK |
| | ID NO: | ID NO: | NO: 225) | ID NO: | ID | ID NO: | GIINPSGGSTSYAQKF | LLIYAASSLQSGVPS |
| | 224) | 69) | | 226) | NO: | 173) | QGRVTMTRDTSTSTVY | RFSGSGSGTDFTLTI |
| | | | | | 65) | | MELSSLRSEDTAVYYC | SSLQPEDFATYYCQQ |
| | | | | | | | AREEYSSSSGYEDYWG | SYSTPLTFGQGTKVE |
| | | | | | | | QGTLVTVSS (SEQ | IK (SEQ ID NO: |
| | | | | | | | ID NO: 504) | 505) |
| 43. | YTFTSY | GWMHPK | CARDTPYYY | RASQSI | AASSL | CQQSYS | QVQLVQSGAEVKKPGA | DIQMTQSPSSLSASV |
| | GIS | SGDTGL | YGMDVW | SSWLA | QS | VPITF | SVKVSCKASGYTFTSY | GDRVTITCRASQSIS |
| | (SEQ | T (SEQ | (SEQ ID | (SEQ | (SEQ | (SEQ | GISWVRQAPGQGLEWM | SWLAWYQQKPGKAPK |
| | ID NO: | ID NO: | NO: 230) | ID NO: | ID | ID NO: | GWMHPKSGDTGLTQKF | LLIYAASSLQSGVPS |
| | 228) | 229) | | 196) | NO: | 231) | QGRVTMTRDTSTSTVY | RFSGSGSGTDETLTI |
| | | | | | 65) | | MELSSLRSEDTAVYYC | SSLQPEDFATYYCQQ |
| | | | | | | | ARDTPYYYYGMDVWGQ | SYSVPITFGQGTKVE |
| | | | | | | | GTTVTVSS (SEQ ID | IK (SEQ ID NO: |
| | | | | | | | NO: 506) | 507) |
| 44. | FTFSSY | SAISGS | CAKERFIDY | QASQDI | SSLQS | QQTYSG | EVQLLESGGGLVQPGG | DIQMTQSPSSLSASV |
| | AMS | GGSTYY | GMDVW | SNYLN | (SEQ | WT | SLRLSCAASGFTESSY | GDRVTITCQASQDIS |
| | (SEQ | A (SEQ | (SEQ ID | (SEQ | ID | (SEQ | AMSWVRQAPGKGLEWV | NYLNWYQQKPGKAPK |
| | ID NO: | ID NO: | NO: 508) | ID NO: | NO: | ID NO: | SAISGSGGSTYYADSV | LLIYAASSLQSGVPS |
| | 473) | 103) | | 138) | 362) | 509) | KGRFTISRDNSKNTLY | RFSGSGSGTDFTLTI |
| | | | | | | | LQMNSLRAEDTAVYYC | SSLQPEDFATYYCQQ |
| | | | | | | | AKERFIDYGMDVWGQG | TYSGWTFGPGTKVDI |
| | | | | | | | TTVTVSS (SEQ ID | K (SEQ ID NO: |
| | | | | | | | NO: 510) | 511) |
| 45. | FTFGDY | SYISGD | CARDVAATG | RASQSI | AASSL | CQQSYS | EVQLVESGGGLVKPGG | DIQMTQSPSSLSASV |
| | AMS | IGYTNY | NWYFDLW | SSYLN | QS | TPLTF | SLRLSCAASGFTFGDY | GDRVTITCRASQSIS |
| | (SEQ | A (SEQ | (SEQ ID | (SEQ | (SEQ | (SEQ | AMSWVRQAPGKGLEWV | SYLNWYQQKPGKAPK |
| | ID NO: | ID NO: | NO: 235) | ID NO: | ID | ID NO: | SYISGDIGYTNYAAPV | LLIYAASSLQSGVPS |
| | 233) | 234) | | 172) | NO: | 173) | KGRFTISRDDSKNTLY | RFSGSGSGTDETLTI |
| | | | | | 65) | | LQMNSLKTEDTAVYYC | SSLQPEDFATYYCQQ |
| | | | | | | | ARDVAATGNWYFDLWG | SYSTPLTFGGGTKVE |
| | | | | | | | RGTLVTVSS (SEQ | IK (SEQ ID NO: |
| | | | | | | | ID NO: 512) | 459) |
| 46. | FSFSSY | SFITSS | CARDRRGDY | RASQSV | GASTR | CQQYGS | EVQLLESGGGLVQPGG | EIVMTQSPATLSVSP |
| | TMN | SRTIYY | GDSWYFDLW | RNYLA | AT | SPLTE | SLRLSCAASGFSFSSY | GERATLSCRASQSVR |
| | (SEQ | A (SEQ | (SEQ ID | (SEQ | (SEQ | (SEQ | TMNWVRQAPGKGLEWV | NYLAWYQQKPGQAPR |
| | ID NO: | ID NO: | NO: 239) | ID NO: | ID | ID NO: | SFITSSSRTIYYADSV | LLIYGASTRATGIPA |
| | 237) | 238) | | 240) | NO: | 242) | KGRFTISRDNSKNTLY | RFSGSGSGTEFTLTI |
| | | | | | 241) | | LQMNSLRAEDTAVYYC | SSLQSEDFAVYYCQQ |
| | | | | | | | ARDRRGDYGDSWYFDL | YGSSPLTFGGGTKVE |
| | | | | | | | WGRGTLVTVSS (SEQ | IK (SEQ ID NO: |
| | | | | | | | ID NO: 513) | 514) |
| 47. | YTFTGH | GIINPS | CARDTGYSY | RASQSI | DASNL | CQQSYS | QVQLVQSGAEVKKPGA | DIQMTQSPSSLSASV |
| | YMH | GGSTSY | GRYYYYGMD | GRWLA | QS | IPITF | SVKVSCKASGYTFSKH | GDRVTITCRASQSIS |
| | (SEQ | A (SEQ | VW (SEQ | (SEQ | (SEQ | (SEQ | FVHWVRQAPGQGLEWM | SWLAWYQQKPGKAPK |
| | ID NO: | ID NO: | ID NO: | ID NO: | ID | ID NO: | GWMNPNSGNSGYAQKF | LLIYAASTLQSGVPS |
| | 244) | 69) | 220) | 221) | NO: | 198) | QGRVTMTRDTSTSTVY | RFSGSGSGTDETLTI |
| | | | | | 222) | | MELSSLRSEDTAVYYC | SSLQPEDFATYYCQQ |
| | | | | | | | ARGEGGYYYYGMDVWG | SYSTPWTFGQGTKVE |
| | | | | | | | QGTLVTVSS (SEQ | IK (SEQ ID NO: |
| | | | | | | | ID NO: 515) | 516) |
| 48. | YTFSKH | GWMNPN | CARGEGGYY | RASQSI | AASTL | CQQSYS | EVQLLESGGGLVQPGG | DIQMTQSPSSLSASV |
| | FVH | SGNSGY | YYGMDVW | SSWLA | QS | TPWTF | SLRLSCAASGFTFGSY | GDRVTITCRASQPLS |
| | (SEQ | A (SEQ | (SEQ ID | (SEQ | (SEQ | (SEQ | SMSWVRQAPGKGLEWV | NWLAWYQQKPGKAPK |
| | ID NO: | ID NO: | NO: 248) | ID NO: | ID | ID NO: | SAIGTGGGTYYADSVK | LLIYAASSLQSGVPS |
| | 246) | 247) | | 196) | NO: | 114) | GRFTISRDNSKNTLYL | RFSGSGSGTDETLTI |
| | | | | | 113) | | QMNSLRAEDTAVYYCA | SSLQPEDFATYYCQQ |
| | | | | | | | KGTPYYYYYGMDVWGQ | AISFPLTFGGGTKVE |
| | | | | | | | GTMVTVSS (SEQ ID | IK (SEQ ID NO: |
| | | | | | | | NO: 517) | 518) |
| 49. | FTFGSY | SAIGTG | CAKGTPYYY | RASQPL | AASSL | CQQAIS | QVQLVQSGAEVKKPGA | DIQMTQSPSSLSASV |
| | SMS | GGTYYA | YYGMDVW | SNWLA | QS | FPLTF | SVKVSCKASGYTFTSY | GDRVTITCQSSEDIS |
| | (SEQ | (SEQ | (SEQ ID | (SEQ | (SEQ | (SEQ | YMHWVRQAPGQGLEWM | SSLNWYQQKPGKAPK |
| | ID NO: | ID NO: | NO: 252) | ID NO: | ID | ID NO: | GWMNPNSGNTGYAQKF | LLIYAASSLQIGVPS |
| | 250) | 251) | | 253) | NO: | 254) | QGRVTMTRDTSTSTVY | RFSGSGSGTDETLTI |
| | | | | | 65) | | MELSSLRSEDTAVYYC | SSLQPEDFATYYCQQ |
| | | | | | | | ARDLGYYDSSGYFGAF | TYSTPYTFGQGTKVE |
| | | | | | | | DIWGQGTTVTVSS | IK (SEQ ID NO: |
| | | | | | | | (SEQ ID NO: 519) | 520) |
| 50. | YTFTSY | GWMNPN | CARDLGYYD | QSSEDI | AASSL | CQQTYS | QVQLVQSGAEVKKPGA | DIQMTQSPSSLSASV |
| | YMH | SGNTGY | SSGYFGAFD | SSSLN | QI | TPYTE | SVKVSCKASGYTFTSY | GDRVTITCRASQGIG |
| | (SEQ | A (SEQ | IW (SEQ | (SEQ | (SEQ | (SEQ | GISWVRQAPGQGLEWM | NWLAWYQQKPGKAPK |
| | ID NO: | ID NO: | ID NO: | ID NO: | ID | ID NO: | GIINPRGGSTIFAQKF | LLIYAASNLETGVPS |
| | 215) | 205) | 256) | 257) | NO: | 259) | QGRVTMTRDTSTSTVY | RFSGSGSGTDETLTI |
| | | | | | 258) | | MELSSLRSEDTAVYYC | SSLQPEDFATYYCQQ |
| | | | | | | | ARGTRSSGWYGWEDPW | IHSYPLTFGGGTKVE |
| | | | | | | | GQGTLVTVSS (SEQ | IK (SEQ ID NO: |
| | | | | | | | ID NO: 521) | 522) |
| 51. | YTFTSY | GIINPR | CARGTRSSG | RASQGI | AASNL | CQQIHS | EVQLVESGGGLVKPGG | DIVMTQSPLSLPVTP |
| | GIS | GGSTIF | WYGWFDPW | GNWLA | ET | YPLTF | SLRLSCAASGFIFQDS | GEPASISCRSSQSLL |
| | (SEQ | A (SEQ | (SEQ ID | (SEQ | (SEQ | (SEQ | AIHWVRQAPGKGLEWV | HSNGYNYLDWYLQKP |
| | ID NO: | ID NO: | NO: 262) | ID NO: | ID | ID NO: | SAIGTGGGTYYAAPVK | GOSPQLLIYDASNLE |
| | 228) | 261) | | 263) | NO: | 265) | GRFTISRDDSKNTLYL | TGVPDRFSGSGSGTD |
| | | | | | 264) | | QMNSLKTEDTAVYYCA | FTLKISRVEAEDVGV |
| | | | | | | | RSYCSGGSCSLGSWGQ | YYCMQALQTPLTFGQ |
| | | | | | | | GTLVTVSS (SEQ ID | GTKVEIK(SEQID |
| | | | | | | | NO: 523) | NO:524) |
| 52. | FTEDDY | SYISSS | CAREIAAAG | RASQSI | AASSL | CQQSYS | EVQLLESGGGLVQPGG | DIQMTQSPSSLSASV |
| | GMS | SSYIYY | FYGMDVW | SSYLN | QS | TPLTE | SLRLSCAASGFTEDDY | GDRVTITCRASQSIS |
| | (SEQ | A (SEQ | (SEQ ID | (SEQ | (SEQ | (SEQ | GMSWVRQAPGKGLEWV | SYLNWYQQKPGKAPK |
| | ID NO: | ID NO: | NO: 269) | ID NO: | ID | ID NO: | SYISSSSSYIYYADSV | LLIYAASSLQSGVPS |
| | 267) | 268) | | 172) | NO: | 173) | KGRFTISRDNSKNTLY | RFSGSGSGTDFTLTI |
| | | | | | 65) | | LQMNSLRAEDTAVYYC | SSLQPEDFATYYCQQ |
| | | | | | | | AREIAAAGFYGMDVWG | SYSTPLTFGGGTKVE |
| | | | | | | | QGTTVTVSS (SEQ | IK (SEQ ID NO: |
| | | | | | | | ID NO: 525) | 459) |
| 53. | YTFTSY | GWMNPN | CAREGLGYC | RASQGI | SSLQS | QQSYST | QVQLVQSGAEVKKPGA | DIQMTQSPSSLSASV |
| | YMH | SGNTGY | TNGVCWNYY | SSWLA | (SEQ | PYT | SVKVSCKASGYTFTSY | GDRVTITCRASQGIS |
| | (SEQ | A (SEQ | GMDVW | (SEQ | ID | (SEQ | YMHWVRQAPGQGLEWM | SWLAWYQQKPGKAPK |
| | ID NO: | ID NO: | (SEQ ID | ID NO: | NO: | ID NO: | GWMNPNSGNTGYAQKF | LLIYGASSLQSGVPS |
| | 215) | 205) | NO: 526) | 226) | 362) | 527) | QGRVTMTRDTSTSTVY | RFSGSGSGTDETLTI |
| | | | | | | | MELSSLRSEDTAVYYC | SSLQPEDFATYYCQQ |
| | | | | | | | AREGLGYCTNGVCWNY | SYSTPYTFGQGTKVE |
| | | | | | | | YGMDVWGQGTLVTVSS | IK (SEQ ID NO: |
| | | | | | | | (SEQ ID NO: 528) | 529) |
| 54. | GTLSRY | GGIIPI | CARDRVYYD | RASQSV | GASTR | CQQYGS | QVQLVQSGAEVKKPGS | EIVMTQSPATLSVSP |
| | GVS | FGTTNY | SSGYPTWYF | SSSYLA | AT | SPITF | SVKVSCKASGGTLSRY | GERATLSCRASQSVS |
| | (SEQ | A (SEQ | DLW (SEQ | (SEQ | (SEQ | (SEQ | GVSWVRQAPGQGLEWM | SSYLAWYQQKPGQAP |
| | ID NO: | ID NO: | ID NO: | ID NO: | ID | ID NO: | GGIIPIFGTTNYAQKE | RLLIYGASTRATGIP |
| | 271) | 272) | 273) | 274) | NO: | 275) | QGRVTITADESTSTAY | ARFSGSGSGTEFTLT |
| | | | | | 241) | | MELSSLRSEDTAVYYC | ISSLQSEDFAVYYCQ |
| | | | | | | | ARDRVYYDSSGYPTWY | QYGSSPITFGQGTKV |
| | | | | | | | FDLWGRGTLVTVSS | EIK (SEQ ID NO: |
| | | | | | | | (SEQ ID NO: 530) | 531) |
| 55. | FTEDDE | SGISGN | CARDASYGG | QASQDI | KASTL | CQQANS | EVQLLESGGGLVQPGG | DIQMTQSPSSLSASV |
| | AMH | GDSRYY | NYGMDVW | RNYLN | ES | FPLTF | SLRLSCAASGFTEDDE | GDRVTITCQASQDIR |
| | (SEQ | A (SEQ | (SEQ ID | (SEQ | (SEQ | (SEQ | AMHWVRQAPGKGLEWV | NYLNWYQQKPGKAPK |
| | ID NO: | ID NO: | NO: 279) | ID NO: | ID | ID NO: | SGISGNGDSRYYADSV | LLIYKASTLESGVPS |
| | 277) | 278) | | 280) | NO: | 167) | KGRFTISRDNSKNTLY | RFSGSGSGTDFTLTI |
| | | | | | 139) | | LQMNSLRAEDTAVYYC | SSLQPEDFATYYCQQ |
| | | | | | | | ARDASYGGNYGMDVWG | ANSFPLTFGPGTKVD |
| | | | | | | | QGTTVTVSS (SEQ | IK (SEQ ID NO: |
| | | | | | | | ID NO: 532) | 533) |
| 56. | FTESSY | SAIGTG | CAREWLVPY | RASQSI | GASNL | CQQSYS | EVQLVESGGGLVKPGG | DIQMTQSPSSLSASV |
| | WMS | GGTYYA | YGMDVW | SRWLA | QS | TPWTF | SLRLSCAASGFTFSSY | GDRVTITCRASQSIS |
| | (SEQ | (SEQ | (SEQ ID | (SEQ | (SEQ | (SEQ | WMSWVRQAPGKGLEWV | RWLAWYQQKPGKAPK |
| | ID NO: | ID NO: | NO: 282) | ID NO: | ID | ID NO: | SAIGTGGGTYYAAPVK | LLIYGASNLQSGVPS |
| | 169) | 251) | | 283) | NO: | 114) | GRFTISRDDSKNTLYL | RFSGSGSGTDETLTI |
| | | | | | 284) | | QMNSLKTEDTAVYYCA | SSLQPEDFATYYCQQ |
| | | | | | | | REWLVPYYGMDVWGQG | SYSTPWTFGQGTKVE |
| | | | | | | | TTVTVSS (SEQ ID | IK (SEQ ID NO: |
| | | | | | | | NO: 534) | 535) |
| 57. | FSVSSN | AGISYD | CARSRGIAA | KSSQSV | WASTR | CHQYYG | EVQLLESGGGLVQPGG | DIVMTQSPDSLAVSL |
| | YMS | GSSKPY | RPLQHW | LYSSNN | QS | HPPTF | SLRLSCAASGFSVSSN | GERATINCKSSQSVL |
| | (SEQ | A (SEQ | (SEQ ID | KNYLA | (SEQ | (SEQ | YMSWVRQAPGKGLEWV | YSSNNKNYLAWYQQK |
| | ID NO: | ID NO: | NO: 288) | (SEQ | ID | ID NO: | AGISYDGSSKPYADSV | PGQPPKLLIYWASTR |
| | 286) | 287) | | ID NO: | NO: | 291) | KGRFTISRDNSKNTLY | QSGVPDRFSGSGSGT |
| | | | | 289) | 290) | | LQMNSLRAEDTAVYYC | DETLTISSLQAEDVA |
| | | | | | | | ARSRGIAARPLQHWGQ | VYYCHQYYGHPPTFG |
| | | | | | | | GTLVTVSS (SEQ ID | GGTKVEIK (SEQ |
| | | | | | | | NO: 536) | ID NO: 537) |
| 58. | FSVSSN | AGISYD | CARSRGIAA | KSSQSV | QASTR | CHQYYG | EVQLLESGGGLVQPGG | DIVMTQSPDSLAVSL |
| | YMS | GSSKPY | RPLQHW | LYSSNN | QS | HPPTF | SLRLSCAASGFSVSSN | GERATINCKSSQSVL |
| | (SEQ | A (SEQ | (SEQ ID | KNYLA | (SEQ | (SEQ | YMSWVRQAPGKGLEWV | YSSNNKNYLAWYQQK |
| | ID NO: | ID NO: | NO: 288) | (SEQ | ID | ID NO: | AGISYDGSSKPYADSV | PGQPPKLLIYQASTR |
| | 286) | 287) | | ID NO: | NO: | 291) | KGRFTISRDNSKNTLY | QSGVPDRESGSGSGT |
| | | | | 289) | 293) | | LQMNSLRAEDTAVYYC | DFTLTISSLQAEDVA |
| | | | | | | | ARSRGIAARPLQHWGQ | VYYCHQYYGHPPTFG |
| | | | | | | | GTLVTVSS (SEQ ID | GGTKVEIK (SEQ |
| | | | | | | | NO: 536) | ID NO: 538) |
| 59. | FSFSDY | SAISGS | CARDGGWQP | RASQGI | DASNL | CQQSYS | EVQLLESGGGLVQPGG | DIQMTQSPSSLSASV |
| | GMH | GGSTYY | AAILDYW | SNNLN | ET | TPLTF | SLRLSCAASGFSFSDY | GDRVTITCRASQGIS |
| | SEQ | A (SEQ | (SEQ ID | (SEQ | SEQ | (SEQ | GMHWVRQAPGKGLEWV | NNLNWYQQKPGKAPK |
| | ID NO: | ID NO: | NO: 296) | ID NO: | ID | ID NO: | SAISGSGGSTYYADSV | LLIYDASNLETGVPS |
| | 295) | 103) | | 105) | NO: | 173) | KGRFTISRDNSKNTLY | RFSGSGSGTDETLTI |
| | | | | | 159) | | LQMNSLRAEDTAVYYC | SSLQPEDFATYYCQQ |
| | | | | | | | ARDGGWQPAAILDYWG | SYSTPLTFGGGTKVE |
| | | | | | | | QGTLVTVSS (SEQ | IK (SEQ ID NO: |
| | | | | | | | ID NO: 539) | 540) |
| 60. | FTFSDH | SVIYGG | CARDPAVAG | RASQGI | DASNL | CQQSYS | EVQLLESGGGLVQPGG | DIQMTQSPSSLSASV |
| | GMH | ESTYYA | GGIFDYW | SNYLA | ET | TCYTE | SLRLSCAASGFTESDH | GDRVTITCRASQGIS |
| | (SEQ | (SEQ | (SEQ ID | (SEQ | (SEQ | (SEQ | GMHWVRQAPGKGLEWV | NYLAWYQQKPGKAPK |
| | ID NO: | ID NO: | NO: 300) | ID NO: | ID | ID NO: | SVIYGGESTYYADSVK | LLIYDASNLETGVPS |
| | 298) | 299) | | 218) | NO: | 301) | GRFTISRDNSKNTLYL | RFSGSGSGTDFTLTI |
| | | | | | 159) | | QMNSLRAEDTAVYYCA | SSLQPEDFATYYCQQ |
| | | | | | | | RDPAVAGGGIFDYWGQ | SYSTCYTFGQGTKLE |
| | | | | | | | GTLVTVSS (SEQ ID | IK (SEQ ID NO: |
| | | | | | | | NO: 541) | 542) |
| 61. | DTFTGY | GWINPN | CARSGLWLG | RASQTI | DASTL | CQQYSS | QVQLVQSGAEVKKPGA | DIQMTQSPSSLSASV |
| | YIH | SGGTNY | SYYGMDVW | SIWLA | QS | YPLTF | SVKVSCKASGDTFTGY | GDRVTITCRASQTIS |
| | (SEQ | A (SEQ | (SEQ ID | (SEQ | (SEQ | (SEQ | YIHWVRQAPGQGLEWM | IWLAWYQQKPGKAPK |
| | ID NO: | ID NO: | NO: 305) | ID NO: | ID | ID NO: | GWINPNSGGTNYAQKF | LLIYDASTLQSGVPS |
| | 303) | 304) | | 306) | NO: | 308) | QGRVTMTRDTSTSTVY | RFSGSGSGTDETLTI |
| | | | | | 307) | | MELSSLRSEDTAVYYC | SSLQPEDFATYYCQQ |
| | | | | | | | ARSGLWLGSYYGMDVW | YSSYPLTFGQGTKVE |
| | | | | | | | GQGTLVTVSS (SEQ | IK (SEQ ID NO: |
| | | | | | | | ID NO: 543) | 544) |
| 62. | YTFTSY | GWINPN | CARSPYYYY | RASHFI | AASTL | CQQSYS | QVQLVQSGAEVKKPGA | DIQMTQSPSSLSASV |
| | DIN | SGTTGY | GMDVW | SRWVA | QS | GISF | SVKVSCKASGYTFTSY | GDRVTITCRASHFIS |
| | (SEQ | A (SEQ | (SEQ ID | (SEQ | (SEQ | (SEQ | DINWVRQAPGQGLEWM | RWVAWYQQKPGKAPK |
| | ID NO: | ID NO: | NO: 312) | ID NO: | ID | ID NO: | GWINPNSGTTGYAQKF | LLIYAASTLQSGVPS |
| | 310) | 311) | | 313) | NO: | 314) | QGRVTMTRDTSTSTVY | RFSGSGSGTDETLTI |
| | | | | | 113) | | MELSSLRSEDTAVYYC | SSLQPEDFATYYCQQ |
| | | | | | | | ARSPYYYYGMDVWGQG | SYSGISFGPGTKVDI |
| | | | | | | | TTVTVSS (SEQ ID | K (SEQ ID NO: |
| | | | | | | | NO: 545) | 546) |
| 63. | FTENNY | SRINSD | CARGAYYYY | RASQSV | ATSSR | CQQYYS | EVQLLESGGGLVQPGG | EIVMTQSPATLSVSP |
| | GMN | GSSTSY | YMDVW | SGSYLA | AS | GLTF | SLRLSCAASGFTENNY | GERATLSCRASQSVS |
| | (SEQ | A (SEQ | (SEQ ID | (SEç | (SEQ | (SEQ | GMNWVRQAPGKGLEWV | GSYLAWYQQKPGQAP |
| | ID NO: | ID NO: | NO: 318) | ID NO: | ID | ID NO: | SRINSDGSSTSYADSV | RLLIYATSSRASGIP |
| | 316) | 317) | | 319) | NO: | 321) | KGRFTISRDNSKNTLY | ARFSGSGSGTEFTLT |
| | | | | | 320) | | LQMNSLRAEDTAVYYC | ISSLQSEDFAVYYCQ |
| | | | | | | | ARGAYYYYYMDVWGQG | QYYSGLTFGQGTKVE |
| | | | | | | | TLVTVSS (SEQ ID | IK (SEQ ID NO: |
| | | | | | | | NO: 547) | 548) |
| 64. | FTFSNS | AHIWND | CARDRTDPG | RASQDI | DASSL | CQQATS | EVQLLESGGGLVQPGG | DIQMTQSPSSLSASV |
| | DMN | GSQKYY | YSSAMDVW | RNYLG | ET | LPLTF | SLRLSCAASGFTESNS | GDRVTITCRASQDIR |
| | (SEQ | A (SEQ | (SEQ ID | (SEQ | (SEQ | (SEQ | DMNWVRQAPGKGLEWV | NYLGWYQQKPGKAPK |
| | ID NO: | ID NO: | NO: 325) | ID NO: | ID | ID NO: | AHIWNDGSQKYYADSV | LLIYDASSLETGVPS |
| | 323) | 324) | | 326) | NO: | 328) | KGRFTISRDNSKNTLY | RFSGSGSGTDFTLTI |
| | | | | | 327) | | LQMNSLRAEDTAVYYC | SSLQPEDFATYYCQQ |
| | | | | | | | ARDRTDPGYSSAMDVW | ATSLPLTFGGGTKVE |
| | | | | | | | GQGTTVTVSS (SEQ | IK (SEQ ID NO: |
| | | | | | | | ID NO: 549) | 550) |
| 65. | YTFTSY | GWMNPN | CAKDSDYSN | RASQDI | QASSL | CQQSYT | QVQLVQSGAEVKKPGA | DIQMTQSPSSLSASV |
| | DIN | SGNTGY | LLWDYW | TNDLG | ES | IPLTF | SVKVSCKASGYTFTSY | GDRVTITCRASQDIT |
| | (SEQ | A (SEQ | (SEQ ID | (SEQ | (SEQ | (SEQ | DINWVRQAPGQGLEWM | NDLGWYQQKPGKAPK |
| | ID NO: | ID NO: | NO: 330) | ID NO: | ID | ID NO: | GWMNPNSGNTGYAQKF | LLIYQASSLESGVPS |
| | 310) | 205) | | 331) | NO: | 333) | QGRVTMTRDTSTSTVY | RFSGSGSGTDETLTI |
| | | | | | 332) | | MELSSLRSEDTAVYYC | SSLQPEDFATYYCQQ |
| | | | | | | | AKDSDYSNLLWDYWGQ | SYTIPLTFGQGTKVE |
| | | | | | | | GTLVTVSS (SEQ ID | IK (SEQ ID NO: |
| | | | | | | | NO: 51) | 552) |
| 66. | YTFTGH | GIINPS | CARDGAWFG | RASQGI | SNLET | QQYYSE | QVQLVQSGAEVKKPGA | DIQMTQSPSSLSASV |
| | YMH | GGSTSY | EEYYYGMDV | SNWLA | (SEQ | PLYT | SVKVSCKASGYTFTGH | GDRVTITCRASQGIS |
| | (SEQ | A (SEQ | W (SEQ ID | (SEQ | ID | (SEQ | YMHWVRQAPGQGLEWM | NWLAWYQQKPGKAPK |
| | ID NO: | ID NO: | NO: 553) | ID NO: | NO: | ID NO: | GIINPSGGSTSYAQKF | LLIYDASNLETGVPS |
| | 244) | 69) | | 554) | 491) | 555) | QGRVTMTRDTSTSTVY | RFSGSGSGTDETLTI |
| | | | | | | | MELSSLRSEDTAVYYC | SSLQPEDFATYYCQQ |
| | | | | | | | ARDGAWFGEEYYYGMD | YYSFPLYTFGQGTKV |
| | | | | | | | VWGQGTTVTVSS | EIK (SEQ ID NO: |
| | | | | | | | (SEQ ID NO: 556) | 557) |
| 67. | YTFTGY | GMIYPR | CAMTGWGYG | RASQGI | STLQS | QQSYSA | QVQLVQSGAEVKKPGA | DIQMTQSPSSLSASV |
| | YMH | DGSTSY | MDVW (SEQ | NNYLA | (SEQ | PPT | SVKVSCKASGYTFTGY | GDRVTITCRASQGIN |
| | (SEQ | A (SEQ | ID NO: | (SEQ | ID | (SEQ | YMHWVRQAPGQGLEWM | NYLAWYQQKPGKAPK |
| | ID NO: | ID NO: | 559) | ID NO: | NO: | ID NO: | GMIYPRDGSTSYAQKE | LLIYDASTLQSGVPS |
| | 128) | 558) | | 560) | 420) | 561) | QGRVTMTRDTSTSTVY | RFSGSGSGTDETLTI |
| | | | | | | | MELSSLRSEDTAVYYC | SSLQPEDFATYYCQQ |
| | | | | | | | AMTGWGYGMDVWGKGT | SYSAPPTFGQGTKLE |
| | | | | | | | TVTVSS (SEQ ID | IK (SEQ ID NO: |
| | | | | | | | NO: 562) | 563) |
| 68. | FTFGDY | AVVSYD | CAKDICSST | RASQNI | DASNL | CQQANS | EVQLLESGGGLVQPGG | DIQMTQSPSSLSASV |
| | AMS | GTNKYY | SCYFDLW | NNYVN | ET | FPPTE | SLRLSCAASGFTFGDY | GDRVTITCRASQNIN |
| | (SEQ | A (SEQ | (SEQ ID | (SEQ | (SEQ | (SEQ | AMSWVRQAPGKGLEWV | NYVNWYQQKPGKAPK |
| | ID NO: | ID NO: | NO: 336) | ID NO: | ID | ID NO: | AVVSYDGTNKYYADSV | LLIYDASNLETGVPS |
| | 233) | 335) | | 337) | NO: | 338) | KGRFTISRDNSKNTLY | RFSGSGSGTDETLTI |
| | | | | | 159) | | LQMNSLRAEDTAVYYC | SSLQPEDFATYYCQQ |
| | | | | | | | AKDICSSTSCYFDLWG | ANSFPPTFGQGTRLE |
| | | | | | | | RGTLVTVSS (SEQ | IK (SEQ ID NO: |
| | | | | | | | ID NO: 564) | 565) |
| 69. | YTFTSY | GIIDPS | CAREEWSSG | RASQGI | ATSSL | CQQTYS | QVQLVQSGAEVKKPGA | DIQMTQSPSSLSASV |
| | YMH | GGSTSY | GVGYFDYW | SSYLA | QT | IPITF | SVKVSCKASGYTFTSY | GDRVTITCRASQGIS |
| | (SEQ | A (SEQ | (SEQ ID | (SEQ | (SEQ | (SEQ | YMHWVRQAPGQGLEWM | SYLAWYQQKPGKAPK |
| | ID NO: | ID NO: | NO: 341) | ID NO: | ID | ID NO: | GIIDPSGGSTSYAQKF | LLIYATSSLQTGVPS |
| | 215) | 340) | | 342) | NO: | 344) | QGRVTMTRDTSTSTVY | RFSGSGSGTDFTLTI |
| | | | | | 343 | | MELSSLRSEDTAVYYC | SSLQPEDFATYYCQQ |
| | | | | | | | AREEWSSGGVGYFDYW | TYSIPITFGQGTRLE |
| | | | | | | | GQGTLVTVSS (SEQ | IK (SEQ ID NO: |
| | | | | | | | ID NO: 566) | 567) |
| 70. | YPFTDY | GWIKPN | CARDRFVGK | RASQSI | SSLQS | QQSYDT | QVQLVQSGAEVKKPGA | DIQMTQSPSSLSASV |
| | YMH | SGDTEY | PDYYYYGMD | SVWLA | (SEQ | PYT | SVKVSCKASGYPFTDY | GDRVTITCRASQSIS |
| | (SEQ | A (SEQ | VW (SEQ | (SEQ | ID | (SEQ | YMHWVRQAPGQGLEWM | VWLAWYQQKPGKAPK |
| | ID NO: | ID NO: | ID NO: | ID NO: | NO: | ID NO: | GWIKPNSGDTEYAQKF | LLIYAASSLQSGVPS |
| | 568) | 569) | 570) | 571) | 362) | 572) | QGRVTMTRDTSTSTVY | RFSGSGSGTDETLTI |
| | | | | | | | MELSSLRSEDTAVYYC | SSLQPEDFATYYCQQ |
| | | | | | | | ARDRFVGKPDYYYYGM | SYDTPYTFGQGTKLE |
| | | | | | | | DVWGQGTMVTVSS | IK (SEQ ID NO: |
| | | | | | | | (SEQ ID NO: 573) | 574) |
| 71. | YTFTSY | GIINPS | CARDSVAGT | RASQGI | AASSL | CQQSYS | QVQLVQSGAEVKKPGA | DIQMTQSPSSLSASV |
| | YMH | GGSTSY | GGRYYGMDV | SNYFA | QG | LPYTE | SVKVSCKASGYTFTSY | GDRVTITCRASQGIS |
| | (SEQ | A (SEQ | W (SEQ ID | (SEQ | (SEQ | (SEQ | YMHWVRQAPGQGLEWM | NYFAWYQQKPGKAPK |
| | ID NO: | ID NO: | NO: 350) | ID NO: | ID | ID NO: | GIINPSGGSTSYAQKF | LLIYAASSLOGGVPS |
| | 215) | 69) | | 351) | NO: | 353) | QGRVTMTRDTSTSTVY | RFSGSGSGTDETLTI |
| | | | | | 352) | | MELSSLRSEDTAVYYC | SSLQPEDFATYYCQQ |
| | | | | | | | ARDSVAGTGGRYYGMD | SYSLPYTFGQGTKLE |
| | | | | | | | VWGQGTLVTVSS | IK (SEQ ID NO: |
| | | | | | | | (SEQ ID NO: 575) | 576) |
| 72. | YTFTSY | GVINPI | CASGAPSYY | RASQSI | SYLAT | QQSYST | QVQLVQSGAEVKKPGA | DIQMTQSPSSLSASV |
| | YMH | GGTTTY | YYGMDVW | SSYLN | (SEQ | PLT | SVKVSCKASGYTFTSY | GDRVTITCRASQSIS |
| | (SEQ | A (SEQ | (SEQ ID | (SEQ | ID | (SEQ | YMHWVRQAPGQGLEWM | SYLNWYQQKPGKAPK |
| | ID NO: | ID NO: | NO: 578) | ID NO: | NO: | ID NO: | GVINPIGGTTTYAQKF | LLIYGTSYLATGVPS |
| | 215) | 577) | | 172) | 579) | 429) | QGRVTMTRDTSTSTVY | RFSGSGSGTDETLTI |
| | | | | | | | MELSSLRSEDTAVYYC | SSLQPEDFATYYCQQ |
| | | | | | | | ASGAPSYYYYGMDVWG | SYSTPLTFGQGTKVE |
| | | | | | | | QGTLVTVSS (SEQ | IK (SEQ ID NO: |
| | | | | | | | ID NO: 580) | 581) |
| 73. | YTFTSN | GRINPH | CARAGQLWS | QASQDI | TALRT | QQSYSH | QVQLVQSGAEVKKPGA | DIQMTQSPSSLSASV |
| | YVH | SGDTSY | DWYFDLW | RNYLN | (SEQ | PLT | SVKVSCKASGYTFTSN | GDRVTITCQASQDIR |
| | (SEQ | A (SEQ | (SEQ ID | (SEQ | ID | (SEQ | YVHWVRQAPGQGLEWM | NYLNWYQQKPGKAPK |
| | ID NO: | ID NO: | NO: 584) | ID NO: | NO: | ID NO: | GRINPHSGDTSYAQKF | LLIYAATALRTGVPS |
| | 582) | 583) | | 280) | 585) | 586) | QGRVTMTRDTSTSTVY | RFSGSGSGTDETLTI |
| | | | | | | | MELSSLRSEDTAVYYC | SSLQPEDFATYYCQQ |
| | | | | | | | ARAGQLWSDWYFDLWG | SYSHPLTFGQGTKVE |
| | | | | | | | RGTLVTVSS (SEQ | IK (SEQ ID NO: |
| | | | | | | | ID NO: 587) | 588) |
| 74. | YTFTGY | GIINPS | CTTADYYYY | RASQGI | AASSL | CQQYYS | QVQLVQSGAEVKKPGA | DIQMTQSPSSLSASV |
| | YMH | GGNTKY | MDVW (SEQ | SNYLA | QS | NADE | SVKVSCKASGYTFTGY | GDRVTITCRASQGIS |
| | (SEQ | A (SEQ | ID NO: | (SEQ | (SEQ | (SEQ | YMHWVRQAPGQGLEWM | NYLAWYQQKPGKAPK |
| | ID NO: | ID NO: | 356) | ID NO: | ID | ID NO: | GIINPSGGNTKYAQKF | LLIYAASSLQSGVPS |
| | 128) | 355) | | 218) | NO: | 357) | QGRVTMTRDTSTSTVY | RFSGSGSGTDFTLTI |
| | | | | | 65) | | MELSSLRSEDTAVYYC | SSLQPEDFATYYCQQ |
| | | | | | | | TTADYYYYMDVWGKGT | YYSNADFGQGTKVEI |
| | | | | | | | TVTVSS (SEQ ID | K (SEQ ID NO: |
| | | | | | | | NO: 589) | 590) |
| 75. | FTESDE | SYISGD | CARDRPYYY | RASQSV | SSLQS | QQYKSY | EVQLLESGGGLVQPGG | DIQMTQSPSSLSASV |
| | WMH | SGYTNY | YMDVW | SRSLA | (SEQ | PVT | SLRLSCAASGFTESDE | GDRVTITCRASQSVS |
| | (SEQ | A (SEQ | (SEQ ID | (SEQ | ID | (SEQ | WMHWVRQAPGKGLEWI | RSLAWYQQKPGKAPK |
| | ID NO: | ID NO: | NO: 360) | ID NO: | NO: | ID NO: | SYISGDSGYTNYADSV | LLIYAASSLQSGVPS |
| | 359) | 170) | | 361) | 362) | 363) | KGRFTISRDNSKNTLY | RFSGSGSGTDETLTI |
| | | | | | | | LQMNSLRAEDTAVYYC | SSLQPEDFATYYCQQ |
| | | | | | | | ARDRPYYYYMDVWGKG | YKSYPVTFGQGTKVE |
| | | | | | | | TTVTVSS (SEQ ID | IK (SEQ ID NO: |
| | | | | | | | NO: 591) | 592) |
| 76. | FTEDDY | SDISGS | CAKDVVVAG | QASQDI | SYLQS | QQAHNY | EVQLLESGGGLVQPGG | DIQMTQSPSSLSASV |
| | TMH | GGSTYY | TPLHEDYW | SNYLN | (SEQ | PIT | SLRLSCAASGFTEDDY | GDRVTITCQASQDIS |
| | (SEQ | A (SEQ | (SEQ ID | (SEQ | ID | (SEQ | TMHWVRQAPGKGLEWV | NYLNWYQQKPGKAPK |
| | ID NO: | ID NO: | NO: 367) | ID NO: | NO: | ID NO: | SDISGSGGSTYYADSV | LLIYAASYLQSGVPS |
| | 365) | 366) | | 138) | 368) | 369) | KGRFTISRDNSKNTLY | RFSGSGSGTDFTLTI |
| | | | | | | | LQMNSLRAEDTAVYYC | SSLQPEDFATYYCQQ |
| | | | | | | | AKDVVVAGTPLHFDYW | AHNYPITFGQGTRLE |
| | | | | | | | GQGTLVTVSS (SEQ | IK (SEQ ID NO: |
| | | | | | | | ID NO: 593) | 594) |
| 77. | FTFSNA | ASISST | CAREVVGAT | RASQSI | SSLQS | QQANAF | EVQLLESGGGLVQPGG | DIQMTQSPSSLSASV |
| | WMS | SAYIDY | TEDYW | STWLA | (SEQ | PPT | SLRLSCAASEFTESNA | GDRVTITCRASQSIS |
| | (SEQ | A (SEQ | (SEQ ID | (SEQ | ID | (SEQ | WMSWVRQAPGKGLEWV | TWLAWYQQKPGKAPK |
| | ID NO: | ID NO: | NO: 372) | ID NO: | NO: | ID NO: | ASISSTSAYIDYADSV | LLIYAASSLQSGVPS |
| | 183) | 371) | | 373) | 362) | 374) | KGRFTISRDNSKNTLY | RFSGSGSGTDFTLTI |
| | | | | | | | LQMNSLRAEDTAVYYC | SSLQPEDFATYYCQQ |
| | | | | | | | AREVVGATTEDYWGQG | ANAFPPTFGQGTRLE |
| | | | | | | | TLVTVSS (SEQ ID | IK (SEQ ID NO: |
| | | | | | | | NO: 595) | 596) |
| 78. | GTFSSY | GWME PH | CAKGGFSWF | KSSQSV | STRES | QQYYST | QVQLVQSGAEVKKPGS | DIVMTQSPDSLAVSL |
| | AIS | TGNTRY | DPW (SEQ | LYSSNN | (SEQ | PPT | SVKVSCKASGGTESSY | GERATINCKSSQSVL |
| | (SEQ | A (SEQ | ID NO: | KNYLA | ID | (SEQ | AISWVRQAPGQGLEWM | YSSNNKNYLAWYQQK |
| | ID NO: | ID NO: | 377) | (SEQ | NO: | ID NO: | GWMEPHTGNTRYAQKF | PGQPPKLLIYWASTR |
| | 77) | 376) | | ID NO: | 378) | 379) | QGRVTITADESTSTAY | ESGVPDRESGSGSGT |
| | | | | 289) | | | MELSSLRSEDTAVYYC | DETLTISSLQAEDVA |
| | | | | | | | AKGGFSWFDPWGQGTL | VYYCQQYYSTPPTFG |
| | | | | | | | VTVSS (SEQ ID | QGTRLEIK(SEQ |
| | | | | | | | NO: 597) | IDNO:598) |
| 79. | FTEDDY | ASITSS | CARERVDWN | RASQGI | STRAT | QQYYTY | EVQLLESGGGLVKPGG | EIVMTQSPATLSVSP |
| | AMH | SAFIDY | SYFDLW | SNSYLA | (SEç | PPT | SLRLSCAASGFTEDDY | GERATLSCRASQGIS |
| | (SEQ | A (SEQ | (SEQ ID | (SEQ | ID | (SEQ | AMHWVRQAPGKGLEWV | NSYLAWYQQKPGQAP |
| | ID NO: | ID NO: | NO: 382) | ID NO: | NO: | ID NO: | ASITSSSAFIDYAASV | RLLIYGASTRATGIP |
| | 135) | 381) | | 383) | 384) | 385) | KGRFTISRDDSKNTLY | ARFSGSGSGTEFTLT |
| | | | | | | | LQMNSLKTEDTAVYYC | ISSLQSEDFAVYYCQ |
| | | | | | | | ARERVDWNSYFDLWGR | QYYTYPPTFGPGTKV |
| | | | | | | | GTLVTVSS (SEQ ID | DIK (SEQ ID NO: |
| | | | | | | | NO: 599) | 600) |
| 80. | FTEDDY | SAISGS | CAKDLGVVV | QASQDI | SNLEA | QQSYST | EVQLLESGGGLVQPGG | DIQMTQSPSSLSASV |
| | AMH | GGSTYY | PAALDYW | SNHLN | (SEQ | PLT | SLRLSCAASGFTEDDY | GDRVTITCQASQDIS |
| | (SEQ | A (SEQ | (SEQ ID | (SEQ | ID | (SEQ | AMHWVRQAPGKGLEWV | NHLNWYQQKPGKAPK |
| | ID NO: | ID NO: | NO: 601) | ID NO: | NO: | ID NO: | SAISGSGGSTYYADSV | LLIYDASNLEAGVPS |
| | 135) | 103) | | 602) | 603) | 429) | KGRFTISRDNSKNTLY | RFSGSGSGTDETLTI |
| | | | | | | | LQMNSLRAEDTAVYYC | SSLQPEDFATYYCQQ |
| | | | | | | | AKDLGVVVPAALDYWG | SYSTPLTFGGGTKVE |
| | | | | | | | QGTTVTVSS (SEQ | IK (SEQ ID NO: |
| | | | | | | | ID NO: 604) | 605) |
| 81. | FAFSSH | AGTSGS | CARETYYYY | RASQGI | ANLEG | QQSDIF | EVQLLESGGGLVKPGG | DIQMTQSPSSLSASV |
| | WMH | GESRDY | YMDVW | SNYLA | (SEQ | PPT | SLRLSCAASGFAFSSH | GDRVTITCRASQGIS |
| | (SEQ | A (SEQ | (SEQ ID | (SEQ | ID | (SEQ | WMHWVRQAPGKGLEWV | NYLAWYQQKPGKAPK |
| | ID NO: | ID NO: | NO: 389) | ID NO: | NO: | ID NO: | AGTSGSGESRDYADFV | LLIYDAANLEGGVPS |
| | 387) | 388) | | 218) | 390) | 391) | KGRFTISRDDSKNTLY | RFSGSGSGTDETLTI |
| | | | | | | | LQMNSLKTEDTAVYYC | SSLQPEDFATYYCQQ |
| | | | | | | | ARETYYYYYMDVWGKG | SDIFPPTFGQGTKVE |
| | | | | | | | TTVTVSS (SEQ ID | IK (SEQ ID NO: |
| | | | | | | | NO: 606) | 607) |
| 82. | YTFTRH | GWINVK | CARESSGWY | RASQSI | SSLQS | QQSNSF | QVQLVQSGAEVKKPGA | DIQMTQSPSSLSASV |
| | WIH | TGGAGY | GTDVW | SNYLA | (SEQ | PLT | SVKVSCKASGYTFTRH | GDRATITCRASQSIS |
| | (SEQ | A (SEQ | (SEQ ID | (SEQ | ID | SEQ | WIHWVRQAPGQGLEWM | NYLAWYQQKPGKAPK |
| | ID NO: | ID NO: | NO: 395) | ID NO: | NO: | ID NO: | GWINVKTGGAGYAQKF | LLIYAASSLQSGVPS |
| | 393) | 394) | | 396) | 362) | 397) | QGRVTMTRDTSTSTVY | RFSGSGSGTDETLTI |
| | | | | | | | MELSSLRSEDTAVYYC | SSLQPEDFATYYCQQ |
| | | | | | | | ARESSGWYGTDVWGQG | SNSFPLTFGGGTKVE |
| | | | | | | | TTVTVSS (SEQ ID | IK (SEQ ID NO: |
| | | | | | | | NO: 608) | 609) |
| 83. | FTFSSY | AAISYD | CARENKQWL | QASQDI | NLRS | QQANSF | EVQLLESGGGLVQPGG | DIQMTQSPSSLSASV |
| | WMH | GKYKDY | ASFDYW | SNFVN | (SEQ | PVT | SLRLSCAASGFTESSY | GDRVTITCQASQDIS |
| | (SEQ | E (SEQ | (SEQ ID | (SEQ | ID | (SEQ | WMHWVRQAPGKGLEWV | NFVNWYQQKPGKAPK |
| | ID NO: | ID NO: | NO: 400) | ID NO: | NO: | ID NO: | AAISYDGKYKDYEDSV | LLIYAANLRSGVPSR |
| | 83) | 399) | | 401) | 402) | 403) | KGRFTISRDNSKNTLY | FSGSGSGTDETLTIS |
| | | | | | | | LQMNSLRAEDTAVYYC | SLQPEDFATYYCQQA |
| | | | | | | | ARENKQWLASFDYWGQ | NSFPVTFGPGTKVDI |
| | | | | | | | GTLVTVSS (SEQ ID | K (SEQ ID NO: |
| | | | | | | | NO: 610) | 611) |
| 84. | GTESSS | GWISAY | CASRVHSGG | QASEHI | SSLQS | QQTDSI | QVQLVQSGAEVKKPGA | DIQMTQSPSSLSASV |
| | AIS | NGYTNY | SYPDDYW | YNYLN | (SEQ | PIT | SVKVSCKASGGTFSSS | GDRVTITCQASEHIY |
| | (SEQ | A (SEQ | (SEQ ID | (SEQ | ID | (SEQ | AISWVRQAPGQGLEWM | NYLNWYQQKPGKAPK |
| | ID NO: | ID NO: | NO: 614) | ID NO: | NO: | ID NO: | GWISAYNGYTNYAQKF | LLIYAASSLQSGVPS |
| | 612) | 613) | | 615) | 362) | 616) | QGRVTMTRDTSTSTVY | RFSGSGSGTDETLTI |
| | | | | | | | MELSSLRSEDTAVYYC | SSLQPEDFATYYCQQ |
| | | | | | | | ASRVHSGGSYPDDYWG | TDSIPITFGQGTKVE |
| | | | | | | | QGTLVTVSS (SEQ | IK (SEQ ID NO: |
| | | | | | | | ID NO: 617) | 618) |

[0329] In some embodiments, the antibody comprises the CDRs of Clone ID: 6, Clone ID: 75, or Clone ID: 79 of Table 7.

[0330] The IgG and scFv formats illustrated herein are simply non-limiting examples. The CDRs provided herein can be placed in different formats, including different VH and VL/VK formats and still be able to bind to MAdCAM.

[0331] Although the CDRs are illustrated in the tables provided herein, there are other ways to annotate or identify CDRs. For example, in some embodiments, the HCDR2 can have an extra amino acid at the N-terminus. For example, for the HCDR2 of Clone 6 the table indicates that it has a sequence of: SRINSYGTSTTYA (SEQ ID NO: 91) However, in some embodiments, the HCDR2 has a sequence of VSRINSYGTSTTYA (SEQ ID NO: 629), which is shown with an extra residue, a valine, at the N-terminus of the HCDR2. The valine is clearly illustrated in VH peptide of the tables provided herein. Therefore, in some embodiments, the HCDR2 comprises one additional amino acid immediately to the N-terminus of the HCDR2 listed in the table. The residue would be the residue that is immediately to the N-terminus of the HCDR2 found in the VH sequence provided for in the table in the same row. One of skill in the art with this information could immediately envisage the HCDR2 peptide sequence that has the additional amino acid residue immediately to the N-terminus of the HCDR2 listed in the table. These embodiments are sufficiently described and do not require application to list each of these different annotations and one of skill in the art with the guidance and description provided herein could write them out individually without any undue experimentation.

[0332] Similarly, the HCDR3 can exclude the cysteine residue. Each of the HCDR3 polypeptides provided for in Tables 6 and 7 begins with a cysteine residue. In some embodiments, the HCDR3 does not include the cysteine. Furthermore, in some embodiments, the HCDR3 does not have the last C-terminal residue illustrated in Table 6 and 7 provided for herein. Therefore, in some embodiments, the HCDR3 does not have the cysteine and/or the last C-terminal residue illustrated in the tables. One of skill in the art with this information could immediately envisage the HCDR3 peptide sequence that does not have the cysteine and/or the last C-terminal residue illustrated in the tables. These embodiments are sufficiently described and do not require application to list each of these different annotations and one of skill in the art with the guidance and description provided herein could write them out individually without any undue experimentation.

[0333] In some embodiments, the light chain CDR2 can have one or two extra amino acid residues at the N-terminus. These additional residues would be those that are immediately to the N-terminus of the light chain CDR2 (LCDR2) present in the VL/VK chain provided for herein, in the same row as the CDRs that are listed. For example, the LCDR2 of Clone 6 is provided as GASSLQS (SEQ ID NO: 87), but in some embodiments could be IYGASSLQS (SEQ ID NO: 630) or YGASSLQS (SEQ ID NO: 631). One of skill in the art with this information could immediately envisage the LCDR2 peptide sequence that has one or two extra amino acid residues at the N-terminus of the LCDR2 sequence provided for herein. These embodiments are sufficiently described and do not require application to list each of these different annotations and one of skill in the art with the guidance and description provided herein could write them out individually without any undue experimentation.

[0334] There are also alternative systems for annotating CDRs, any of which can be used. For example, CDRs can be chosen based on the Kabat sytem, the IMGT system, or the Chothia system. Other proprietary systems can also be used, which may be based on the predicted 3-dimensional structure of the protein. Accordingly, in some embodiments, the CDRs of Clone ID: 6, Clone ID: 75, or Clone ID: 79 of Table 7 can also be characterized as shown in Table 8. These alternative CDRs can be substituted for these clone referenced in Table 7 or the equivalent clone numbering in Table 6, i.e., Clone 6, Clone 59, and Clone 63.

TABLE 8
Alterative CDRs for Certain Clones

| Clone | | | | | | | |
|---|---|---|---|---|---|---|---|
| No. | | | | | | | |
| (Table | Annotation | | | | | | |
| 7) | System | LCDR1 | LCDR2 | LCDR3 | HCDR1 | HCDR2 | HCDR3 |
| 6 | Proprietary | RASQIIG | SSLQS | QQSYRLPFT | FTENNYAFH | SRINSYGTSTTYA | CAREGPVAGY |
| | | TNLA | (SEQ ID | (SEQ ID | (SEQ ID | (SEQ ID NO: | WYFDLW |
| | | (SEQ ID | NO: 362) | NO: 632) | NO: 90) | 91) | (SEQ ID |
| | | NO: 93) | | | | | NO: 92) |
| | Other | RASQIIG | GASSLQS | CQQSYRLPFT | FTENNYAFH | SRINSYGTSTTYA | CAREGPVAGY |
| | Annotation | TNLA | (SEQ ID | F (SEQ ID | (SEQ ID | (SEQ ID NO: | WYFDLW |
| | | (SEQ ID | NO: 87) | NO: 94) | NO: 90 | 91) | (SEQ ID |
| | | NO: 93) | | | | | NO: 92) |
| | Kabat | RASQIIG | GASSLQS | QQSYRLPFT | NYAFH (SEQ | RINSYGTSTTYAD | EGPVAGYWYF |
| | | TNLA | (SEQ ID | (SEQ ID | ID NO: | SVKG (SEQ ID | DL (SEQ ID |
| | | (SEQ ID | NO: 87) | NO: 632) | 633) | NO: 634) | NO: 635) |
| | | NO: 93) | | | | | |
| | IMGT | QIIGTN | GAS | QQSYRLPFT | GFTENNYA | INSYGTST (SEQ | AREGPVAGYW |
| | | (SEQ ID | | (SEQ ID | (SEQ ID | ID NO: 638) | YFDL (SEQ |
| | | NO: | | NO: 632) | NO: 637) | | ID NO: |
| | | 636) | | | | | 639) |
| | CHOTHIA | RASQIIG | GASSLQS | QQSYRLPFT | GFTENNY | NSYGTS (SEQ | EGPVAGYWYF |
| | | TNLA | (SEQ ID | (SEQ ID | (SEQ ID | ID NO: 641) | DL (SEQ ID |
| | | (SEQ ID | NO: 87) | NO: 632) | NO: 640) | | NO: 635) |
| | | NO: 93) | | | | | |
| 75 | Proprietary | RASQSVS | SSLQS | QQYKSYPVT | FTFSDFWMH | SYISGDSGYTNYA | CARDRPYYYY |
| | | RSLA | (SEQ ID | (SEQ ID | (SEQ ID | (SEQ ID NO: | MDVW (SEQ |
| | | (SEQ ID | NO: 362) | NO: 363) | NO: 359) | 170) | ID NO: |
| | | NO: | | | | | 360) |
| | | 361) | | | | | |
| | Other | RASQSVS | AASSLQS | CQQYKSYPVT | FTFSDFWMH | SYISGDSGYTNYA | CARDRPYYYY |
| | Annotation | RSLA | (SEQ ID | F (SEQ ID | (SEQ ID | (SEQ ID NO: | MDVW (SEQ |
| | | (SEQ ID | NO: 65) | NO: 642) | NO: 359) | 170) | ID NO: |
| | | NO: | | | | | 360) |
| | | 361) | | | | | |
| | Kabat | RASQSVS | AASSLQS | QQYKSYPVT | DFWMH (SEQ | YISGDSGYTNYAD | DRPYYYYMDV |
| | | RSLA | (SEQ ID | (SEQ ID | ID NO: | SVKG (SEQ ID | (SEQ ID |
| | | (SEQ ID | NO: 65) | NO: 363) | 643) | NO: 644) | NO: 645) |
| | | NO: | | | | | |
| | | 361) | | | | | |
| | IMGT | QSVSRS | AAS | QQYKSYPVT | GFTFSDFW | ISGDSGYT (SEQ | ARDRPYYYYM |
| | | (SEQ ID | | (SEQ ID | (SEQ ID | ID NO: 648) | DV (SEQ ID |
| | | NO: | | NO: 363) | NO: 647) | | NO: 649) |
| | | 646) | | | | | |
| | CHOTHIA | RASQSVS | AASSLQS | QQYKSYPVT | GFTFSDE | SGDSGY (SEQ | DRPYYYYMDV |
| | | RSLA | (SEQ ID | (SEQ ID | (SEQ ID | ID NO: 651) | (SEQ ID |
| | | (SEQ ID | NO: 65) | NO: 363) | NO: 650) | | NO: 645) |
| | | NO: | | | | | |
| | | 361) | | | | | |
| 79 | Proprietary | RASQGIS | STRAT | QQYYTYPPT | FTEDDYAMH | ASITSSSAFIDYA | CARERVDWNS |
| | | NSYLA | (SEQ ID | (SEQ ID | (SEQ ID | (SEQ ID NO: | YFDLW (SEQ |
| | | (SEQ ID | NO: 384) | NO: 385) | NO: 135) | 381) | ID NO: |
| | | NO: | | | | | 382) |
| | | 383) | | | | | |
| | Other | RASQGIS | GASTRAT | CQQYYTYPPT | FTFDDYAMH | ASITSSSAFIDYA | CARERVDWNS |
| | Annotation | NSYLA | (SEQ ID | F (SEQ ID | (SEQ ID | (SEQ ID NO: | YFDLW (SEQ |
| | | (SEQ ID | NO: 241) | NO: 652) | NO: 135) | 381) | ID NO: |
| | | NO: | | | | | 382) |
| | | 383) | | | | | |
| | Kabat | RASQGIS | GASTRAT | QQYYTYPPT | DYAMH (SEQ | SITSSSAFIDYAA | ERVDWNSYED |
| | | NSYLA | (SEQ ID | (SEQ ID | ID NO: | SVKG (SEQ ID | L (SEQ ID |
| | | (SEQ ID | NO: 241) | NO: 385) | 653) | NO: 654) | NO: 655) |
| | | NO: | | | | | |
| | | 383) | | | | | |
| | IMGT | QGISNSY | GAS | QQYYTYPPT | GFTEDDYA | ITSSSAFI (SEQ | ARERVDWNSY |
| | | (SEQ ID | | (SEQ ID | (SEQ ID | ID NO: 658) | FDL (SEQ |
| | | NO: | | NO: 385) | NO: 657) | | ID NO: |
| | | 656) | | | | | 659) |
| | CHOTHIA | RASQGIS | GASTRAT | QQYYTYPPT | GFTEDDY | TSSSAF (SEQ | ERVDWNSYED |
| | | NSYLA | (SEQ ID | (SEQ ID | (SEQ ID | ID NO: 661) | L (SEQ ID |
| | | (SEQ ID | NO: 241) | NO: 385) | NO: 660) | | NO: 655) |
| | | NO: | | | | | |
| | | 383) | | | | | |

[0335] In some embodiments, the MAdCAM antibody is selected from the following table:

TABLE 9

| Clone | | | | | | | | |
|---|---|---|---|---|---|---|---|---|
| (Fab) | VH Seq | VK Seq | HCDR1 | HCDR2 | HCDR3 | LCDR1 | LCDR2 | LCDR3 |
| MIAB128 | EVQLLESGGGL | DIQMTQSPSS | FTESD | SYISG | CARDR | RASQSV | SSLQS | QQYKSY |
| | VQPGGSLRLSC | LSASVGDRVT | FWMH | DSGYT | PNYYY | SRSLA | (SEQ | PVT |
| | AASGFTFSDFW | ITCRASQSVS | (SEQ | NYA | MDVW | (SEQ | ID NO: | (SEQ |
| | MHWVRQAPGKG | RSLAWYQQKP | ID | (SEQ | (SEQ | ID NO: | 362) | ID NO: |
| | LEWISYISGDS | GKAPKLLIYA | NO: | ID | ID | 361) | | 363) |
| | GYTNYADSVKG | ASSLQSGVPS | 359) | NO: | NO: | | | |
| | RFTISRDNSKN | RFSGSGSGTD | | 170) | 1399) | | | |
| | TLYLQMNSLRA | FTLTISSLQP | | | | | | |
| | EDTAVYYCARD | EDFATYYCQQ | | | | | | |
| | RPNYYYMDVWG | YKSYPVTFGQ | | | | | | |
| | KGTTVTVSS | GTKVEIK | | | | | | |
| | (SEQ ID NO: | NO: 592) | | | | | | |
| | 1346) | | | | | | | |
| MIAB128A | EVQLLESGGGL | DIQMTQSPSS | FTFSD | SYISG | CARDR | RASQSV | SSLQS | QQYKSY |
| | VQPGGSLRLSC | LSASVGDRVT | FWMH | DSGYT | PQYYY | SRSLA | (SEQ | PVT |
| | AASGFTFSDEW | ITCRASQSVS | (SEQ | NYA | MDVW | (SEQ | ID NO: | (SEQ |
| | MHWVRQAPGKG | RSLAWYQQKP | ID | (SEQ | (SEQ | ID NO: | 362) | ID NO: |
| | LEWISYISGDS | GKAPKLLIYA | NO: | ID | ID | 361) | | 363) |
| | GYTNYADSVKG | ASSLQSGVPS | 359) | NO: | NO: | | | |
| | RFTISRDNSKN | RFSGSGSGTD | | 170) | 1400) | | | |
| | TLYLQMNSLRA | FTLTISSLQP | | | | | | |
| | EDTAVYYCARD | EDFATYYCQQ | | | | | | |
| | RPQYYYMDVWG | YKSYPVTEGO | | | | | | |
| | KGTTVTVSS | GTKVEIK | | | | | | |
| | (SEQ ID NO: | (SEQ ID | | | | | | |
| | 1348) | NO: 592) | | | | | | |
| MIAB129 | EVQLLESGGGL | DIQMTQSPSS | FTFSD | SYISG | CARDR | RASQSV | SSLQS | QQYKSY |
| | VQPGGSLRLSC | LSASVGDRVT | FWMH | DSGYT | PGYYY | SRSLA | (SEQ | PVT |
| | AASGFTFSDFW | ITCRASQSVS | (SEQ | NYA | MDVW | (SEQ | ID NO: | (SEQ |
| | MHWVRQAPGKG | RSLAWYQQKP | ID | (SEQ | (SEQ | ID NO: | 362) | ID NO: |
| | LEWISYISGDS | GKAPKLLIYA | NO: | ID | ID | 361) | | 363) |
| | GYTNYADSVKG | ASSLQSGVPS | 359) | NO: | NO: | | | |
| | RFTISRDNSKN | RFSGSGSGTD | | 170) | 1401) | | | |
| | TLYLQMNSLRA | FTLTISSLQP | | | | | | |
| | EDTAVYYCARD | EDFATYYCQQ | | | | | | |
| | RPGYYYMDVWG | YKSYPVTFGQ | | | | | | |
| | KGTTVTVSS | GTKVEIK | | | | | | |
| | (SEQ ID NO: | (SEQ ] | | | | | | |
| | 1349) | NO: 592) | | | | | | |
| MIAB130 | EVQLLESGGGL | DIQMTQSPSS | FTFSD | SYISG | CARDR | RASQSV | SSLQS | QQYKSY |
| | VQPGGSLRLSC | LSASVGDRVT | FWMH | DSGYT | PYYYQ | SRSLA | (SEQ | PVT |
| | AASGFTFSDFW | ITCRASQSVS | (SEQ | NYA | MDVW | (SEQ | ID NO: | (SEQ |
| | MHWVRQAPGKG | RSLAWYQQKP | ID | (SEQ | (SEQ | ID NO: | 362) | ID NO: |
| | LEWISYISGDS | GKAPKLLIYA | NO: | ID | ID | 361) | | 363) |
| | GYTNYADSVKG | ASSLQSGVPS | 359) | NO: | NO: | | | |
| | RFTISRDNSKN | RFSGSGSGTD | | 170) | 1402) | | | |
| | TLYLQMNSLRA | FTLTISSLQP | | | | | | |
| | EDTAVYYCARD | EDFATYYCQQ | | | | | | |
| | RPYYYQMDVWG | YKSYPVTFGQ | | | | | | |
| | KGTTVTVSS | GTKVEIK | | | | | | |
| | (SEQ ID NO: | (SEQ ID | | | | | | |
| | 1350) | NO: 592) | | | | | | |
| MIAB131 | EVQLLESGGGL | DIQMTQSPSS | FTFSD | SYISG | CARDR | RASQSV | SSLQS | QQYKSY |
| | VQPGGSLRLSC | LSASVGDRVT | FWMH | DSGYT | PYYYG | SRSLA | (SEQ | PVT |
| | AASGFTFSDFW | ITCRASQSVS | (SEQ | NYA | MDVW | (SEQ | ID NO: | (SEQ |
| | MHWVRQAPGKG | RSLAWYQQKP | ID | (SEQ | (SEQ | ID NO: | 362) | ID NO: |
| | LEWISYISGDS | GKAPKLLIYA | NO: | ID | ID | 361) | | 363) |
| | GYTNYADSVKG | ASSLQSGVPS | 359) | NO: | NO: | | | |
| | RFTISRDNSKN | RFSGSGSGTD | | 170) | 1403) | | | |
| | TLYLQMNSLRA | FTLTISSLQP | | | | | | |
| | EDTAVYYCARD | EDFATYYCQQ | | | | | | |
| | RPYYYGMDVWG | YKSYPVTFGQ | | | | | | |
| | KGTTVTVSS | GTKVEIK | | | | | | |
| | (SEQ ID NO: | (SEQ ID | | | | | | |
| | 1351) | NO: 592) | | | | | | |
| MIAB132 | EVQLLESGGGL | DIQMTQSPSS | FTFSN | SYISG | CARDR | RASQSV | SSLQS | QQYKSY |
| | VQPGGSLRLSC | LSASVGDRVT | FWMH | DSGYT | PYYYY | SRSLA | (SEQ | PVT |
| | AASGFTFSNFW | ITCRASQSVS | (SEQ | NYA | MDVW | (SEQ | ID NO: | (SEQ |
| | MHWVRQAPGKG | RSLAWYQQKP | ID | (SEQ | (SEQ | ID NO: | 362) | ID NO: |
| | LEWISYISGDS | GKAPKLLIYA | NO: | ID | ID | 361) | | 363) |
| | GYTNYADSVKG | ASSLQSGVPS | 1404) | NO: | NO: | | | |
| | RFTISRDNSKN | RFSGSGSGTD | | 170) | 360) | | | |
| | TLYLQMNSLRA | FTLTISSLQP | | | | | | |
| | EDTAVYYCARD | EDFATYYCQQ | | | | | | |
| | RPYYYYMDVWG | YKSYPVTFGQ | | | | | | |
| | KGTTVTVSS | GTKVEIK | | | | | | |
| | (SEQ ID NO: | (SEQ ID | | | | | | |
| | 1352) | NO: 592) | | | | | | |
| MIAB133 | EVQLLESGGGL | DIQMTQSPSS | FTFSS | SYISG | CARDR | RASQSV | SSLQS | QQYKSY |
| | VQPGGSLRLSC | LSASVGDRVT | FWMH | DSGYT | PYYYY | SRSLA | (SEQ | PVT |
| | AASGFTFSSFW | ITCRASQSVS | (SEQ | NYA | MDVW | (SEQ | ID NO: | (SEQ |
| | MHWVRQAPGKG | RSLAWYQQKP | ID | (SEQ | (SEQ | ID NO: | 362) | ID NO: |
| | LEWISYISGDS | GKAPKLLIYA | NO: | ID | ID | 361) | | 363) |
| | GYTNYADSVKG | ASSLQSGVPS | 1405) | NO: | NO: | | | |
| | RFTISRDNSKN | RFSGSGSGTD | | 170) | 360) | | | |
| | TLYLQMNSLRA | FTLTISSLQP | | | | | | |
| | EDTAVYYCARD | EDFATYYCQQ | | | | | | |
| | RPYYYYMDVWG | YKSYPVTFGQ | | | | | | |
| | KGTTVTVSS | GTKVEIK | | | | | | |
| | (SEQ ID NO: | (SEQ ID | | | | | | |
| | 1353) | NO: 592) | | | | | | |
| MIAB134 | EVQLLESGGGL | DIQMTQSPSS | FTFSA | SYISG | CARDR | RASQSV | SSLQS | QQYKSY |
| | VQPGGSLRLSC | LSASVGDRVT | FWMH | DSGYT | PYYYY | SRSLA | SEQ | PVT |
| | AASGFTFSAFW | ITCRASQSVS | (SEQ | NYA | MDVW | (SEQ | ID NO: | (SEQ |
| | MHWVRQAPGKG | RSLAWYQQKP | ID | (SEQ | (SEQ | ID NO: | 362) | ID NO: |
| | LEWISYISGDS | GKAPKLLIYA | NO: | ID | ID | 361) | | 363) |
| | GYTNYADSVKG | ASSLQSGVPS | 1406) | NO: | NO: | | | |
| | RFTISRDNSKN | RFSGSGSGTD | | 170) | 360) | | | |
| | TLYLQMNSLRA | FTLTISSLQP | | | | | | |
| | EDTAVYYCARD | EDFATYYCQQ | | | | | | |
| | RPYYYYMDVWG | YKSYPVTFGQ | | | | | | |
| | KGTTVTVSS | GTKVEIK | | | | | | |
| | (SEQ ID NO: | (SEQ ID | | | | | | |
| | 1354) | NO: 592) | | | | | | |
| MIAB135 | EVQLLESGGGL | DIQMTQSPSS | FTESD | SYISG | CARDR | RASQSV | SSLQS | QQYKSY |
| | VQPGGSLRLSC | LSASVGDRVT | FWMH | DSGYT | PYYYY | SRSLA | (SEQ | PVT |
| | AASGFTFSDFW | ITCRASQSVS | (SEQ | NYA | MDVW | (SEQ | ID NO: | (SEQ |
| | MHWVRQAPGKG | RSLAWYQQKP | ID | (SEQ | (SEQ | ID NO: | 362) | ID NO: |
| | LEWISYISGDS | GKAPKLLIYA | NO: | ID | ID | 361) | | 363) |
| | GYTNYADSVKG | ASSLQSGVPS | 359) | NO: | NO: | | | |
| | RFTISRDNSNN | RFSGSGSGTD | | 170) | 360) | | | |
| | TLYLQMNSLRA | FTLTISSLQP | | | | | | |
| | EDTAVYYCARD | EDFATYYCQQ | | | | | | |
| | RPYYYYMDVWG | YKSYPVTFGQ | | | | | | |
| | KGTTVTVSS | GTKVEIK | | | | | | |
| | (SEQ ID NO: | (SEQ ID | | | | | | |
| | 1355) | NO: 592) | | | | | | |
| MIAB136 | EVQLLESGGGL | DIQMTQSPSS | FTFSS | SYISG | CARDR | RASQSV | SSLQS | QQYKSY |
| | VQPGGSLRLSC | LSASVGDRVT | YAMS | DSGYT | PYYYY | SRSLA | (SEQ | PVT |
| | AASGFTFSSYA | ITCRASQSVS | (SEQ | NYA | MDVW | (SEQ | ID NO: | (SEQ |
| | MSWVRQAPGKG | RSLAWYQQKP | ID | (SEQ | (SEQ | ID NO: | 362) | ID NO: |
| | LEWISYISGDS | GKAPKLLIYA | NO: | ID | ID | 361) | | 363) |
| | GYTNYADSVKG | ASSLQSGVPS | 473) | NO: | NO: | | | |
| | RFTISRDNSKN | RFSGSGSGTD | | 170) | 360) | | | |
| | TLYLQMNSLRA | FTLTISSLQP | | | | | | |
| | EDTAVYYCARD | EDFATYYCQQ | | | | | | |
| | RPYYYYMDVWG | YKSYPVTFGQ | | | | | | |
| | KGTTVTVSS | GTKVEIK | | | | | | |
| | (SEQ ID NO: | (SEQ ID | | | | | | |
| | 1356) | NO: 592) | | | | | | |
| MIAB137 | EVQLLESGGGL | DIQMTQSPSS | FTFSD | SAISG | CARDR | RASQSV | SSLQS | QQYKSY |
| | VQPGGSLRLSC | LSASVGDRVT | FWMH | SGGST | PYYYY | SRSLA | (SEQ | PVT |
| | AASGFTFSDEW | ITCRASQSVS | (SEQ | YYA | MDVW | (SEQ | ID NO: | (SEQ |
| | MHWVRQAPGKG | RSLAWYQQKP | ID | (SEQ | (SEQ | ID NO: | 362) | ID NO: |
| | LEWVSAISGSG | GKAPKLLIYA | NO: | ID | ID | 361) | | 363) |
| | GSTYYADSVKG | ASSLQSGVPS | 359) | NO: | NO: | | | |
| | RFTISRDNSKN | RFSGSGSGTD | | 103) | 360) | | | |
| | TLYLQMNSLRA | FTLTISSLQP | | | | | | |
| | EDTAVYYCARD | EDFATYYCQQ | | | | | | |
| | RPYYYYMDVWG | YKSYPVTFGQ | | | | | | |
| | KGTTVTVSS | GTKVEIK | | | | | | |
| | (SEQ ID NO: | (SEQ ID | | | | | | |
| | 1357) | NO: 592) | | | | | | |
| MIAB138 | EVQLLESGGGL | DIQMTQSPSS | FTFSS | SAISG | CARDR | RASQSV | SSLQS | QQYKSY |
| | VQPGGSLRLSC | LSASVGDRVT | YAMS | SGGST | PYYYY | SRSLA | (SEQ | PVT |
| | AASGFTESSYA | ITCRASQSVS | (SEQ | YYA | MDVW | (SEQ | ID NO: | (SEQ |
| | MSWVRQAPGKG | RSLAWYQQKP | ID | (SEQ | (SEQ | ID NO: | 362) | ID NO: |
| | LEWVSAISGSG | GKAPKLLIYA | NO: | ID | ID | 361) | | 363) |
| | GSTYYADSVKG | ASSLQSGVPS | 473) | NO: | NO: | | | |
| | RFTISRDNSKN | RFSGSGSGTD | | 103) | 360) | | | |
| | TLYLQMNSLRA | FTLTISSLQP | | | | | | |
| | EDTAVYYCARD | EDFATYYCQQ | | | | | | |
| | RPYYYYMDVWG | YKSYPVTFGQ | | | | | | |
| | KGTTVTVSS | GTKVEIK | | | | | | |
| | (SEQ ID NO: | (SEQ ID | | | | | | |
| | 1358) | NO: 592) | | | | | | |
| MIAB139 | EVQLLESGGGL | DIQMTQSPSS | FTFSD | SYISG | CARDR | RASQSI | SSLQS | QQSYST |
| | VQPGGSLRLSC | LSASVGDRVT | FWMH | DSGYT | PYYYY | SSYLN | (SEQ | PRT |
| | AASGFTFSDFW | ITCRASQSIS | (SEQ | NYA | MDVW | (SEQ | ID NO: | (SEQ |
| | MHWVRQAPGKG | SYLNWYQQKP | ID | (SEQ | (SEQ | ID NO: | 362) | ID NO: |
| | LEWISYISGDS | GKAPKLLIYA | NO: | ID | ID | 172) | | 1407) |
| | GYTNYADSVKG | ASSLQSGVPS | 359) | NO: | NO: | | | |
| | RFTISRDNSKN | RFSGSGSGTD | | 170) | 360) | | | |
| | TLYLQMNSLRA | FTLTISSLQP | | | | | | |
| | EDTAVYYCARD | EDFATYYCQQ | | | | | | |
| | RPYYYYMDVWG | SYSTPRTFGQ | | | | | | |
| | KGTTVTVSS | GTKVEIK | | | | | | |
| | (SEQ ID NO: | (SEQ ID | | | | | | |
| | 591) | NO: 1360) | | | | | | |
| MIAB140 | EVQLLESGGGL | DIQMTQSPSS | FTESS | SAISG | CARDR | RASQSI | SSLQS | QQSYST |
| | VQPGGSLRLSC | LSASVGDRVT | YAMS | SGGST | PYYYY | SSYLN | (SEQ | PRT |
| | AASGFTESSYA | ITCRASQSIS | (SEQ | YYA | MDVW | (SEQ | ID NO: | (SEQ |
| | MSWVRQAPGKG | SYLNWYQQKP | ID | (SEQ | (SEQ | ID NO: | 362) | ID NO: |
| | LEWVSAISGSG | GKAPKLLIYA | NO: | ID | ID | 172) | | 1407) |
| | GSTYYADSVKG | ASSLQSGVPS | 473) | NO: | NO: | | | |
| | RFTISRDNSKN | RFSGSGSGTD | | 103) | 360) | | | |
| | TLYLQMNSLRA | FTLTISSLQP | | | | | | |
| | EDTAVYYCARD | EDFATYYCQQ | | | | | | |
| | RPYYYYMDVWG | SYSTPRTFGQ | | | | | | |
| | KGTTVTVSS | GTKVEIK | | | | | | |
| | (SEQ ID NO: | (SEQ ID | | | | | | |
| | 1358) | NO: 1360) | | | | | | |
| MIAB141 | EVQLLESGGGL | DIQMTQSPSS | FTFSD | SYISG | CARDR | RASQSI | SSLQS | QQYKSY |
| | VQPGGSLRLSC | LSASVGDRVT | FWMH | DSGYT | PYYYY | SSYLN | (SEQ | PVT |
| | AASGFTESDEW | ITCRASQSIS | (SEQ | NYA | MDVW | (SEQ | ID NO: | (SEQ |
| | MHWVRQAPGKG | SYLNWYQQKP | ID | (SEQ | (SEQ | ID NO: | 362) | ID NO: |
| | LEWISYISGDS | GKAPKLLIYA | NO: | ID | ID | 172) | | 363) |
| | GYTNYADSVKG | ASSLQSGVPS | 359) | NO: | NO: | | | |
| | RFTISRDNSKN | RFSGSGSGTD | | 170) | 360) | | | |
| | TLYLQMNSLRA | FTLTISSLQP | | | | | | |
| | EDTAVYYCARD | EDFATYYCQQ | | | | | | |
| | RPYYYYMDVWG | YKSYPVTFGQ | | | | | | |
| | KGTTVTVSS | GTKVEIK | | | | | | |
| | (SEQ ID NO: | (SEQ ID | | | | | | |
| | 591) | NO: 1361) | | | | | | |
| MIAB142 | EVQLLESGGGL | DIQMTQSPSS | FTFSD | SYISG | CARDR | RASQSV | SSLQS | QQSYST |
| | VQPGGSLRLSC | LSASVGDRVT | FWMH | DSGYT | PYYYY | SRSLA | (SEQ | PRT |
| | AASGFTFSDFW | ITCRASQSVS | (SEQ | NYA | MDVW | (SEQ | ID NO: | (SEQ |
| | MHWVRQAPGKG | RSLAWYQQKP | ID | (SEQ | (SEQ | ID NO: | 362) | ID NO: |
| | LEWISYISGDS | GKAPKLLIYA | NO: | ID | ID | 361) | | 1407) |
| | GYTNYADSVKG | ASSLQSGVPS | 359) | NO: | NO: | | | |
| | RFTISRDNSKN | RFSGSGSGTD | | 170) | 360) | | | |
| | TLYLQMNSLRA | FTLTISSLQP | | | | | | |
| | EDTAVYYCARD | EDFATYYCQQ | | | | | | |
| | RPYYYYMDVWG | SYSTPRTFGQ | | | | | | |
| | KGTTVTVSS | GTKVEIK | | | | | | |
| | (SEQ ID NO: | (SEQ ID | | | | | | |
| | 591) | NO: 1362) | | | | | | |
| MIAB143 | EVQLLESGGGL | DIQMTQSPSS | FTFSD | SYISG | CARDR | RASQSV | SSLQS | QQYKSY |
| | VQPGGSLRLSC | LSASVGDRVT | FWMH | DSGYT | PYYYY | SRSLA | (SEQ | PVT |
| | AASGFTFSDEW | ITCRASQSVS | (SEQ | NYA | MDVW | (SEQ | ID NO: | (SEQ |
| | MHWVRQAPGKG | RSLAWYQQKP | ID | (SEQ | (SEQ | ID NO: | 362) | ID NO: |
| | LEWISYISGDS | GKAPKLLIYA | NO: | ID | ID | 361) | | 363) |
| | GYTNYADSVKG | ASSLQSGVPS | 359) | NO: | NO: | | | |
| | RFTISRDNSKN | RFSGSGSGTD | | 170) | 360) | | | |
| | TLYLQMNSLRA | FTLTISSLQP | | | | | | |
| | EDTAVYYCARD | EDFATYYCQQ | | | | | | |
| | RPYYYYMDVWG | YKSYPVTFGQ | | | | | | |
| | KGTTVTVSS | GTKVEIK | | | | | | |
| | (SEQ ID NO: | (SEQ ID | | | | | | |
| | 591) | NO: 592) | | | | | | |
| MIAB144 | EVQLLESGGGL | DIQMTQSPSS | FTESD | SYISG | CARDR | RASQSV | SSLQS | QQYKSY |
| | VQPGGSLRLSC | LSASVGDRVT | FWMH | DSGYT | PYYYY | SRSLA | (SEQ | PVT |
| | AASGFTFSDFW | ITCRASQSVS | (SEQ | NYA | MDVW | (SEQ | ID NO: | (SEQ |
| | MHWVRQAPGKG | RSLAWYQQKP | ID | (SEQ | (SEQ | ID NO: | 362) | ID NO: |
| | LEWISYISGDS | GKAPKLLIYA | NO: | ID | ID | 361) | | 363) |
| | GYTNYADSVKG | ASSLQSGVPS | 359) | NO: | NO: | | | |
| | RFTISRDNSKN | RFSGSGSGTD | | 170) | 360) | | | |
| | TLYLQMNSLRA | FTLTISSLQP | | | | | | |
| | EDTAVYYCARD | EDFATYYCQQ | | | | | | |
| | RPYYYYMDVWG | YKSYPVTFGQ | | | | | | |
| | KGTTVTVSS | GTKVEIK | | | | | | |
| | (SEQ ID NO: | (SEQ ID | | | | | | |
| | 591) | NO: 592) | | | | | | |
| MIAB145 | EVQLLESGGGL | DIQMTQSPSS | FTFSD | SYISG | CARDR | RASQSI | SSLQS | QQYKSY |
| | VQPGGSLRLSC | LSASVGDRVT | FWMH | DSGYT | PYYYY | SRSLA | (SEQ | PVT |
| | AASGFTESDFW | ITCRASQSIS | (SEQ | NYA | MDVW | (SEQ | ID NO: | (SEQ |
| | MHWVRQAPGKG | RSLAWYQQKP | ID | (SEQ | (SEQ | ID NO: | 362) | ID NO: |
| | LEWISYISGDS | GKAPKLLIYA | NO: | ID | ID | 1408) | | 363) |
| | GYTNYADSVKG | ASSLQSGVPS | 359) | NO: | NO: | | | |
| | RFTISRDNSKN | RFSGSGSGTD | | 170) | 360) | | | |
| | TLYLQMNSLRA | FTLTISSLQP | | | | | | |
| | EDTAVYYCARD | EDFATYYCQQ | | | | | | |
| | RPYYYYMDVWG | YKSYPVTFGQ | | | | | | |
| | KGTTVTVSS | GTKVEIK | | | | | | |
| | (SEQ ID NO: | (SEQ ID | | | | | | |
| | 591) | NO: 1363) | | | | | | |
| MIAB146 | EVQLLESGGGL | DIQMTQSPSS | FTFSD | SYISG | CARDR | RASQSV | SSLQS | QQYKSY |
| | VQPGGSLRLSC | LSASVGDRVT | FWMH | DSGYT | PYYYY | SSSLA | (SEQ | PVT |
| | AASGFTFSDFW | ITCRASQSVS | (SEQ | NYA | MDVW | (SEQ | ID NO: | (SEQ |
| | MHWVRQAPGKG | SSLAWYQQKP | ID | (SEQ | (SEQ | ID NO: | 362) | ID NO: |
| | LEWISYISGDS | GKAPKLLIYA | NO: | ID | ID | 1409) | | 363) |
| | GYTNYADSVKG | ASSLQSGVPS | 359) | NO: | NO: | | | |
| | RFTISRDNSKN | RFSGSGSGTD | | 170) | 360) | | | |
| | TLYLQMNSLRA | FTLTISSLQP | | | | | | |
| | EDTAVYYCARD | EDFATYYCQQ | | | | | | |
| | RPYYYYMDVWG | YKSYPVTFGQ | | | | | | |
| | KGTTVTVSS | GTKVEIK | | | | | | |
| | (SEQ ID NO: | (SEQ ID | | | | | | |
| | 591) | NO: 1364) | | | | | | |
| MIAB147 | EVQLLESGGGL | DIQMTQSPSS | FTFSD | SYISG | CARDR | RASQSV | SSLQS | QQYKSY |
| | VQPGGSLRLSC | LSASVGDRVT | FWMH | DSGYT | PYYYY | SRYLA | (SEQ | PVT |
| | AASGETESDEW | ITCRASQSVS | (SEQ | NYA | MDVW | (SEQ | ID NO: | (SEQ |
| | MHWVRQAPGKG | RYLAWYQQKP | ID | (SEQ | (SEQ | ID NO: | 362) | ID NO: |
| | LEWISYISGDS | GKAPKLLIYA | NO: | ID | ID | 1410) | | 363) |
| | GYTNYADSVKG | ASSLQSGVPS | 359) | NO: | NO: | | | |
| | RFTISRDNSKN | RFSGSGSGTD | | 170) | 360) | | | |
| | TLYLQMNSLRA | FTLTISSLQP | | | | | | |
| | EDTAVYYCARD | EDFATYYCQQ | | | | | | |
| | RPYYYYMDVWG | YKSYPVTFGQ | | | | | | |
| | KGTTVTVSS | GTKVEIK | | | | | | |
| | (SEQ ID NO: | (SEQ ID | | | | | | |
| | 591) | NO: 1365) | | | | | | |
| MIAB148 | EVQLLESGGGL | DIQMTQSPSS | FTFSD | SYISG | CARDR | RASQSV | SSLQS | QQYKSY |
| | VQPGGSLRLSC | LSASVGDRVT | FWMH | DSGYT | PYYYY | SRSLN | (SEQ | PVT |
| | AASGFTFSDFW | ITCRASQSVS | (SEQ | NYA | MDVW | (SEQ | ID NO: | (SEQ |
| | MHWVRQAPGKG | RSLNWYQQKP | ID | (SEQ | (SEQ | ID NO: | 362) | ID NO: |
| | LEWISYISGDS | GKAPKLLIYA | NO: | ID | ID | 1411) | | 363) |
| | GYTNYADSVKG | ASSLQSGVPS | 359) | NO: | NO: | | | |
| | RFTISRDNSKN | RFSGSGSGTD | | 170) | 360) | | | |
| | TLYLQMNSLRA | FTLTISSLQP | | | | | | |
| | EDTAVYYCARD | EDFATYYCQQ | | | | | | |
| | RPYYYYMDVWG | YKSYPVTFGQ | | | | | | |
| | KGTTVTVSS | GTKVEIK | | | | | | |
| | (SEQ ID NO: | (SEQ ID | | | | | | |
| | 591) | NO: 1366) | | | | | | |
| MIAB149 | EVQLLESGGGL | DIQMTQSPSS | FTFSD | SYISG | CARDR | RASQSI | SSLQS | QQYKSY |
| | VQPGGSLRLSC | LSASVGDRVT | FWMH | DSGYT | PYYYY | SSSLA | (SEQ | PVT |
| | AASGFTESDFW | ITCRASQSIS | (SEQ | NYA | MDVW | (SEQ | ID NO: | (SEQ |
| | MHWVRQAPGKG | SSLAWYQQKP | ID | (SEQ | (SEQ | ID NO: | 362) | ID NO: |
| | LEWISYISGDS | GKAPKLLIYA | NO: | ID | ID | 1412) | | 363) |
| | GYTNYADSVKG | ASSLQSGVPS | 359) | NO: | NO: | | | |
| | RFTISRDNSKN | RFSGSGSGTD | | 170) | 360) | | | |
| | TLYLQMNSLRA | FTLTISSLQP | | | | | | |
| | EDTAVYYCARD | EDFATYYCQQ | | | | | | |
| | RPYYYYMDVWG | YKSYPVTFGQ | | | | | | |
| | KGTTVTVSS | GTKVEIK | | | | | | |
| | (SEQ ID NO: | (SEQ ID | | | | | | |
| | 591) | NO: 1367) | | | | | | |
| MIAB150 | EVQLLESGGGL | DIQMTQSPSS | FTESD | SYISG | CARDR | RASQSI | SSLQS | QQYKSY |
| | VQPGGSLRLSC | LSASVGDRVT | FWMH | DSGYT | PYYYY | SRYLA | (SEQ | PVT |
| | AASGFTFSDFW | ITCRASQSIS | (SEQ | NYA | MDVW | (SEQ | ID NO: | (SEQ |
| | MHWVRQAPGKG | RYLAWYQQKP | ID | (SEQ | (SEQ | ID NO: | 362) | ID NO: |
| | LEWISYISGDS | GKAPKLLIYA | NO: | ID | ID | 1413) | | 363) |
| | GYTNYADSVKG | ASSLQSGVPS | 359) | NO: | NO: | | | |
| | RFTISRDNSKN | RFSGSGSGTD | | 170) | 360) | | | |
| | TLYLQMNSLRA | FTLTISSLQP | | | | | | |
| | EDTAVYYCARD | EDFATYYCQQ | | | | | | |
| | RPYYYYMDVWG | YKSYPVTFGQ | | | | | | |
| | KGTTVTVSS | GTKVEIK | | | | | | |
| | (SEQ ID NO: | (SEQ ID | | | | | | |
| | 591) | NO: 1368) | | | | | | |
| MIAB151 | EVQLLESGGGL | DIQMTQSPSS | FTFSD | SYISG | CARDR | RASQSI | SSLQS | QQYKSY |
| | VQPGGSLRLSC | LSASVGDRVT | FWMH | DSGYT | PYYYY | SRSLN | (SEQ | PVT |
| | AASGFTFSDEW | ITCRASQSIS | (SEQ | NYA | MDVW | (SEQ | ID NO: | (SEQ |
| | MHWVRQAPGKG | RSLNWYQQKP | ID | (SEQ | (SEQ | ID NO: | 362) | ID NO: |
| | LEWISYISGDS | GKAPKLLIYA | NO: | ID | ID | 1414) | | 363) |
| | GYTNYADSVKG | ASSLQSGVPS | 359) | NO: | NO: | | | |
| | RFTISRDNSKN | RFSGSGSGTD | | 170) | 360) | | | |
| | TLYLQMNSLRA | FTLTISSLQP | | | | | | |
| | EDTAVYYCARD | EDFATYYCQQ | | | | | | |
| | RPYYYYMDVWG | YKSYPVTFGQ | | | | | | |
| | KGTTVTVSS | GTKVEIK | | | | | | |
| | (SEQ ID NO: | (SEQ ID | | | | | | |
| | 591) | NO: 1369) | | | | | | |
| MIAB152 | EVQLLESGGGL | DIQMTQSPSS | FTFSD | SYISG | CARDR | RASQSV | SSLQS | QQYKSY |
| | VQPGGSLRLSC | LSASVGDRVT | FWMH | DSGYT | PYYYY | SSYLA | (SEQ | PVT |
| | AASGFTFSDFW | ITCRASQSVS | (SEQ | NYA | MDVW | (SEQ | ID NO: | (SEQ |
| | MHWVRQAPGKG | SYLAWYQQKP | ID | (SEQ | (SEQ | ID NO: | 362) | ID NO: |
| | LEWISYISGDS | GKAPKLLIYA | NO: | ID | ID | 1415) | | 363) |
| | GYTNYADSVKG | ASSLQSGVPS | 359) | NO: | NO: | | | |
| | RFTISRDNSKN | RFSGSGSGTD | | 170) | 360) | | | |
| | TLYLQMNSLRA | FTLTISSLQP | | | | | | |
| | EDTAVYYCARD | EDFATYYCQQ | | | | | | |
| | RPYYYYMDVWG | YKSYPVTFGQ | | | | | | |
| | KGTTVTVSS | GTKVEIK | | | | | | |
| | (SEQ ID NO: | (SEQ ID | | | | | | |
| | 591) | NO: 1370) | | | | | | |
| MIAB153 | EVQLLESGGGL | DIQMTQSPSS | FTFSD | SYISG | CARDR | RASQSV | SSLQS | QQYKSY |
| | VQPGGSLRLSC | LSASVGDRVT | FWMH | DSGYT | PYYYY | SSSLN | (SEQ | PVT |
| | AASGFTESDEW | ITCRASQSVS | (SEQ | NYA | MDVW | (SEQ | ID NO: | (SEQ |
| | MHWVRQAPGKG | SSLNWYQQKP | ID | (SEQ | (SEQ | ID NO: | 362) | ID NO: |
| | LEWISYISGDS | GKAPKLLIYA | NO: | ID | ID | 1416) | | 363) |
| | GYTNYADSVKG | ASSLQSGVPS | 359) | NO: | NO: | | | |
| | RFTISRDNSKN | RFSGSGSGTD | | 170) | 360) | | | |
| | TLYLQMNSLRA | FTLTISSLQP | | | | | | |
| | EDTAVYYCARD | EDFATYYCQQ | | | | | | |
| | RPYYYYMDVWG | YKSYPVTFGQ | | | | | | |
| | KGTTVTVSS | GTKVEIK | | | | | | |
| | (SEQ ID NO: | (SEQ ID | | | | | | |
| | 591) | NO: 1371) | | | | | | |
| MIAB154 | EVQLLESGGGL | DIQMTQSPSS | FTFSD | SYISG | CARDR | RASQSV | SSLQS | QQYKSY |
| | VQPGGSLRLSC | LSASVGDRVT | FWMH | DSGYT | PYYYY | SRYLN | (SEQ | PVT |
| | AASGFTFSDFW | ITCRASQSVS | (SEQ | NYA | MDVW | (SEQ | ID NO: | (SEQ |
| | MHWVRQAPGKG | RYLNWYQQKP | ID | (SEQ | (SEQ | ID NO: | 362) | ID NO: |
| | LEWISYISGDS | GKAPKLLIYA | NO: | ID | ID | 1417) | | 363) |
| | GYTNYADSVKG | ASSLQSGVPS | 359) | NO: | NO: | | | |
| | RFTISRDNSKN | RFSGSGSGTD | | 170) | 360) | | | |
| | TLYLQMNSLRA | FTLTISSLQP | | | | | | |
| | EDTAVYYCARD | EDFATYYCQQ | | | | | | |
| | RPYYYYMDVWG | YKSYPVTFGQ | | | | | | |
| | KGTTVTVSS | GTKVEIK | | | | | | |
| | (SEQ ID NO: | (SEQ ID | | | | | | |
| | 591) | NO: 1372) | | | | | | |
| MIAB155 | EVQLLESGGGL | DIQMTQSPSS | FTFSD | SYISG | CARDR | RASQSI | SSLQS | QQYKSY |
| | VQPGGSLRLSC | LSASVGDRVT | FWMH | DSGYT | PYYYY | SSSLN | (SEQ | PVT |
| | AASGFTFSDFW | ITCRASQSIS | (SEQ | NYA | MDVW | (SEQ | ID NO: | (SEQ |
| | MHWVRQAPGKG | SSLNWYQQKP | ID | (SEQ | (SEQ | ID NO: | 362) | ID NO: |
| | LEWISYISGDS | GKAPKLLIYA | NO: | ID | ID | 1418) | | 363) |
| | GYTNYADSVKG | ASSLQSGVPS | 359) | NO: | NO: | | | |
| | RFTISRDNSKN | RFSGSGSGTD | | 170) | 360) | | | |
| | TLYLQMNSLRA | FTLTISSLQP | | | | | | |
| | EDTAVYYCARD | EDFATYYCQQ | | | | | | |
| | RPYYYYMDVWG | YKSYPVTFGQ | | | | | | |
| | KGTTVTVSS | GTKVEIK | | | | | | |
| | (SEQ ID NO: | SEQ ID | | | | | | |
| | 591) | NO: 1373) | | | | | | |
| MIAB156 | EVQLLESGGGL | DIQMTQSPSS | FTFSD | SYISG | CARDR | RASQSI | SSLQS | QQYKSY |
| | VQPGGSLRLSC | LSASVGDRVT | FWMH | DSGYT | PYYYY | SRYLN | SEQ | PVT |
| | AASGFTFSDFW | ITCRASQSIS | (SEQ | NYA | MDVW | SEQ | ID NO: | (SEQ |
| | MHWVRQAPGKG | RYLNWYQQKP | ID | (SEQ | (SEQ | ID NO: | 362) | ID NO: |
| | LEWISYISGDS | GKAPKLLIYA | NO: | ID | ID | 1419) | | 363) |
| | GYTNYADSVKG | ASSLQSGVPS | 359) | NO: | NO: | | | |
| | RFTISRDNSKN | RFSGSGSGTD | | 170) | 360) | | | |
| | TLYLQMNSLRA | FTLTISSLQP | | | | | | |
| | EDTAVYYCARD | EDFATYYCQQ | | | | | | |
| | RPYYYYMDVWG | YKSYPVTFGQ | | | | | | |
| | KGTTVTVSS | GTKVEIK | | | | | | |
| | (SEQ ID NO: | SEQ ID | | | | | | |
| | 591) | NO: 1374) | | | | | | |
| MIAB157 | EVQLLESGGGL | DIQMTQSPSS | FTESD | SYISG | CARDR | RASQSI | SSLQS | QQYKSY |
| | VQPGGSLRLSC | LSASVGDRVT | FWMH | DSGYT | PYYYY | SSYLA | SEQ | PVT |
| | AASGFTFSDFW | ITCRASQSIS | (SEQ | NYA | MDVW | (SEQ | ID NO: | (SEQ |
| | MHWVRQAPGKG | SYLAWYQQKP | ID | (SEQ | (SEQ | ID NO: | 362) | ID NO: |
| | LEWISYISGDS | GKAPKLLIYA | NO: | ID | ID | 1420) | | 363) |
| | GYTNYADSVKG | ASSLQSGVPS | 359) | NO: | NO: | | | |
| | RFTISRDNSKN | RFSGSGSGTD | | 170) | 360) | | | |
| | TLYLQMNSLRA | FTLTISSLQP | | | | | | |
| | EDTAVYYCARD | EDFATYYCQQ | | | | | | |
| | RPYYYYMDVWG | YKSYPVTFGQ | | | | | | |
| | KGTTVTVSS | GTKVEIK | | | | | | |
| | (SEQ ID NO: | (SEQ ID | | | | | | |
| | 591) | NO: 1375) | | | | | | |
| MIAB158 | EVQLLESGGGL | DIQMTQSPSS | FTFSD | SYISG | CARDR | RASQSV | SSLQS | QQYKSY |
| | VQPGGSLRLSC | LSASVGDRVT | FWMH | DSGYT | PYYYY | SSYLN | (SEQ | PVT |
| | AASGFTFSDFW | ITCRASQSVS | (SEQ | NYA | MDVW | SEQ | ID NO: | (SEQ |
| | MHWVRQAPGKG | SYLNWYQQKP | ID | (SEQ | (SEQ | ID NO: | 362) | ID NO: |
| | LEWISYISGDS | GKAPKLLIYA | NO: | ID | ID | 1421) | | 363) |
| | GYTNYADSVKG | ASSLQSGVPS | 359) | NO: | NO: | | | |
| | RFTISRDNSKN | RFSGSGSGTD | | 170) | 360) | | | |
| | TLYLQMNSLRA | FTLTISSLQP | | | | | | |
| | EDTAVYYCARD | EDFATYYCQQ | | | | | | |
| | RPYYYYMDVWG | YKSYPVTFGQ | | | | | | |
| | KGTTVTVSS | GTKVEIK | | | | | | |
| | (SEQ ID NO: | (SEQ ID | | | | | | |
| | 591) | NO: 1376) | | | | | | |
| MIAB159 | EVQLLESGGGL | DIQMTQSPSS | FTFSD | SYISG | CARDR | RASQSV | SSLQS | QQYKSY |
| | VQPGGSLRLSC | LSASVGDRVT | FWMH | ESGYT | PYYYY | SRSLA | (SEQ | PVT |
| | AASGFTFSDEW | ITCRASQSVS | (SEQ | NYA | MDVW | (SEQ | ID NO: | (SEQ |
| | MHWVRQAPGKG | RSLAWYQQKP | ID | (SEQ | (SEQ | ID NO: | 362) | ID NO: |
| | LEWISYISGES | GKAPKLLIYA | NO: | ID | ID | 361) | | 363) |
| | GYTNYADSVKG | ASSLQSGVPS | 359) | NO: | NO: | | | |
| | RFTISRDNSKN | RFSGSGSGTD | | 1422) | 360) | | | |
| | TLYLQMNSLRA | FTLTISSLQP | | | | | | |
| | EDTAVYYCARD | EDFATYYCQQ | | | | | | |
| | RPYYYYMDVWG | YKSYPVTFGQ | | | | | | |
| | KGTTVTVSS | GTKVEIK | | | | | | |
| | (SEQ ID NO: | (SEQ ID | | | | | | |
| | 1377) | NO: 592) | | | | | | |
| MIAB160 | EVQLLESGGGL | DIQMTQSPSS | FTFSD | SYISG | CARDR | RASQSV | SSLQS | QQYKSY |
| | VQPGGSLRLSC | LSASVGDRVT | FWMH | DSGYT | PYYYY | SRSLA | (SEQ | PVT |
| | AASGFTESDEW | ITCRASQSVS | (SEQ | QYA | MDVW | (SEQ | ID NO: | (SEQ |
| | MHWVRQAPGKG | RSLAWYQQKP | ID | (SEQ | (SEQ | ID NO: | 362) | ID NO: |
| | LEWISYISGDS | GKAPKLLIYA | NO: | ID | ID | 361) | | 363) |
| | GYTQYADSVKG | ASSLQSGVPS | 359) | NO: | NO: | | | |
| | RFTISRDNSKN | RFSGSGSGTD | | 1423) | 360) | | | |
| | TLYLQMNSLRA | FTLTISSLQP | | | | | | |
| | EDTAVYYCARD | EDFATYYCQQ | | | | | | |
| | RPYYYYMDVWG | YKSYPVTFGQ | | | | | | |
| | KGTTVTVSS | GTKVEIK | | | | | | |
| | (SEQ ID NO: | (SEQ ID | | | | | | |
| | 1378) | NO: 592) | | | | | | |
| MIAB161 | EVQLLESGGGL | DIQMTQSPSS | FTFSD | SYISG | CARDR | RASQSV | SSLQS | QQYKSY |
| | VQPGGSLRLSC | LSASVGDRVT | FWMH | DSGYT | PYYYY | SRSLA | (SEQ | PVT |
| | AASGFTFSDFW | ITCRASQSVS | (SEQ | NYA | MDVW | (SEQ | ID NO: | (SEQ |
| | MHWVRQAPGKG | RSLAWYQQKP | ID | (SEQ | (SEQ | ID NO: | 362) | ID NO: |
| | LEWISYISGDS | GKAPKLLIYA | NO: | ID | ID | 361) | | 363) |
| | GYTNYADSVKG | ASSLQSGVPS | 359) | NO: | NO: | | | |
| | RFTISRDQSKN | RFSGSGSGTD | | 170) | 360) | | | |
| | TLYLQMNSLRA | FTLTISSLQP | | | | | | |
| | EDTAVYYCARD | EDFATYYCQQ | | | | | | |
| | RPYYYYMDVWG | YKSYPVTFGQ | | | | | | |
| | KGTTVTVSS | GTKVEIK | | | | | | |
| | (SEQ ID NO: | | | | | | | |
| | 1379) | (SEQ ID NO: | | | | | | |
| | | 592) | | | | | | |
| MIAB162 | EVQLLESGGGL | DIQMTQSPSS | FTFSD | SYISG | CARDR | RASQSV | SSLQS | QQYKSY |
| | VQPGGSLRLSC | LSASVGDRVT | FWMH | DSGYT | PYYYY | SRSLG | (SEQ | PVT |
| | AASGFTESDEW | ITCRASQSVS | (SEQ | NYA | MDVW | (SEQ | ID NO: | (SEQ |
| | MHWVRQAPGKG | RSLGWYQQKP | ID | (SEQ | (SEQ | ID NO: | 362) | ID NO: |
| | LEWISYISGDS | GKAPKLLIYA | NO: | ID | ID | 1424) | | 363) |
| | GYTNYADSVKG | ASSLQSGVPS | 359) | NO: | NO: | | | |
| | RFTISRDNSKN | RFSGSGSGTD | | 170) | 360) | | | |
| | TLYLQMNSLRA | FTLTISSLQP | | | | | | |
| | EDTAVYYCARD | EDFATYYCQQ | | | | | | |
| | RPYYYYMDVWG | YKSYPVTFGQ | | | | | | |
| | KGTTVTVSS | GTKVEIK | | | | | | |
| | (SEQ ID NO: | (SEQ ID | | | | | | |
| | 591) | NO: 1380) | | | | | | |
| MIAB163 | EVQLLESGGGL | DIQMTQSPSS | FTFSD | SYISG | CARDR | RASQSV | SSLQS | QQYKSY |
| | VQPGGSLRLSC | LSASVGDRVT | FWMH | DSGYT | PYYYY | SRSLD | (SEQ | PVT |
| | AASGFTESDFW | ITCRASQSVS | (SEQ | NYA | MDVW | SEQ | ID NO: | (SEQ |
| | MHWVRQAPGKG | RSLDWYQQKP | ID | (SEQ | (SEQ | ID NO: | 362) | ID NO: |
| | LEWISYISGDS | GKAPKLLIYA | NO: | ID | ID | 1425) | | 363) |
| | GYTNYADSVKG | ASSLQSGVPS | 359) | NO: | NO: | | | |
| | RFTISRDNSKN | RFSGSGSGTD | | 170) | 360) | | | |
| | TLYLQMNSLRA | FTLTISSLQP | | | | | | |
| | EDTAVYYCARD | EDFATYYCQQ | | | | | | |
| | RPYYYYMDVWG | YKSYPVTFGQ | | | | | | |
| | KGTTVTVSS | GTKVEIK | | | | | | |
| | (SEQ ID NO: | (SEQ ID | | | | | | |
| | 591) | NO: 1381) | | | | | | |
| MIAB164 | EVQLLESGGGL | DIQMTQSPSS | FTFSD | SYISG | CARDR | RASQSV | SSLQS | QQYKSY |
| | VQPGGSLRLSC | LSASVGDRVT | FWMH | DSGYT | PYYYY | SRSLT | (SEQ | PVT |
| | AASGFTFSDFW | ITCRASQSVS | (SEQ | NYA | MDVW | (SEQ | ID NO: | (SEQ |
| | MHWVRQAPGKG | RSLTWYQQKP | ID | (SEQ | (SEQ | ID NO: | 362) | ID NO: |
| | LEWISYISGDS | GKAPKLLIYA | NO: | ID | ID | 1426) | | 363) |
| | GYTNYADSVKG | ASSLQSGVPS | 359) | NO: | NO: | | | |
| | RFTISRDNSKN | RFSGSGSGTD | | 170) | 360) | | | |
| | TLYLQMNSLRA | FTLTISSLQP | | | | | | |
| | EDTAVYYCARD | EDFATYYCQQ | | | | | | |
| | RPYYYYMDVWG | YKSYPVTFGQ | | | | | | |
| | KGTTVTVSS | GTKVEIK | | | | | | |
| | (SEQ ID NO: | (SEQ ID | | | | | | |
| | 591) | NO: 1382) | | | | | | |
| MIAB165 | EVQLLESGGGL | DIQMTQSPSS | FTFSD | SYISG | CARDR | RASQSV | SSLQS | QQYKSY |
| | VQPGGSLRLSC | LSASVGDRVT | FWMH | DSGYT | PYYYY | SRSLS | (SEQ | PVT |
| | AASGFTFSDFW | ITCRASQSVS | (SEQ | NYA | MDVW | (SEQ | ID NO: | (SEQ |
| | MHWVRQAPGKG | RSLSWYQQKP | ID | (SEQ | (SEQ | ID NO: | 362) | ID NO: |
| | LEWISYISGDS | GKAPKLLIYA | NO: | ID | ID | 1427) | | 363) |
| | GYTNYADSVKG | ASSLQSGVPS | 359) | NO: | NO: | | | |
| | RFTISRDNSKN | RFSGSGSGTD | | 170) | 360) | | | |
| | TLYLQMNSLRA | FTLTISSLOP | | | | | | |
| | EDTAVYYCARD | EDFATYYCQQ | | | | | | |
| | RPYYYYMDVWG | YKSYPVTFGQ | | | | | | |
| | KGTTVTVSS | GTKVEIK | | | | | | |
| | (SEQ ID NO: | (SEQ ID | | | | | | |
| | 591) | NO: 1383) | | | | | | |
| MIAB166 | EVQLLESGGGL | DIQMTQSPSS | FTFSD | SYISG | CARDR | RASQSV | SSLQS | QQYKSY |
| | VQPGGSLRLSC | LSASVGDRVT | FWMH | DSGYT | PYYYY | SRSLE | (SEQ | PVT |
| | AASGFTFSDFW | ITCRASQSVS | (SEQ | NYA | MDVW | (SEQ | ID NO: | (SEQ |
| | MHWVRQAPGKG | RSLEWYQQKP | ID | (SEQ | (SEQ | ID NO: | 362) | ID NO: |
| | LEWISYISGDS | GKAPKLLIYA | NO: | ID | ID | 1428) | | 363) |
| | GYTNYADSVKG | ASSLQSGVPS | 359) | NO: | NO: | | | |
| | RFTISRDNSKN | RFSGSGSGTD | | 170) | 360) | | | |
| | TLYLQMNSLRA | FTLTISSLOP | | | | | | |
| | EDTAVYYCARD | EDFATYYCQQ | | | | | | |
| | RPYYYYMDVWG | YKSYPVTFGQ | | | | | | |
| | KGTTVTVSS | GTKVEIK | | | | | | |
| | (SEQ ID NO: | | | | | | | |
| | 591) | (SEQ ID | | | | | | |
| | | NO: 1384) | | | | | | |
| MIAB167 | EVQLLESGGGL | DIQMTQSPSS | FTFSD | SYISG | CARDR | RASQSV | SSLQS | QQYKSY |
| | VQPGGSLRLSC | LSASVGDRVT | FWMH | DSGYT | PYYYY | SRSLK | SEQ | PVT |
| | AASGFTFSDFW | ITCRASQSVS | (SEQ | NYA | MDVW | (SEQ | ID NO: | (SEQ |
| | MHWVRQAPGKG | RSLKWYQQKP | ID | (SEQ | (SEQ | ID NO: | 362) | ID NO: |
| | LEWISYISGDS | GKAPKLLIYA | NO: | ID | ID | 1429) | | 363) |
| | GYTNYADSVKG | ASSLQSGVPS | 359) | NO: | NO: | | | |
| | RFTISRDNSKN | RFSGSGSGTD | | 170) | 360) | | | |
| | TLYLQMNSLRA | FTLTISSLQP | | | | | | |
| | EDTAVYYCARD | EDFATYYCQQ | | | | | | |
| | RPYYYYMDVWG | YKSYPVTFGQ | | | | | | |
| | KGTTVTVSS | GTKVEIK | | | | | | |
| | (SEQ ID NO: | (SEQ ID | | | | | | |
| | 591) | NO: 1385) | | | | | | |
| MIAB168 | EVQLLESGGGL | DIQMTQSPSS | FTFSD | SYISG | CARDR | RASQSV | SSLQS | QQYKSY |
| | VQPGGSLRLSC | LSASVGDRVT | FWMH | DSGYT | PYYYY | SRSLL | (SEQ | PVT |
| | AASGFTFSDEW | ITCRASQSVS | (SEQ | NYA | MDVW | (SEQ | ID NO: | (SEQ |
| | MHWVRQAPGKG | RSLLWYQQKP | ID | (SEQ | (SEQ | ID NO: | 362) | ID NO: |
| | LEWISYISGDS | GKAPKLLIYA | NO: | ID | ID | 1430) | | 363) |
| | GYTNYADSVKG | ASSLQSGVPS | 359) | NO: | NO: | | | |
| | RFTISRDNSKN | RFSGSGSGTD | | 170) | 360) | | | |
| | TLYLQMNSLRA | FTLTISSLQP | | | | | | |
| | EDTAVYYCARD | EDFATYYCQQ | | | | | | |
| | RPYYYYMDVWG | YKSYPVTFGQ | | | | | | |
| | KGTTVTVSS | GTKVEIK | | | | | | |
| | (SEQ ID NO: | (SEQ ID | | | | | | |
| | 591) | NO: 1386) | | | | | | |
| MIAB169 | EVQLLESGGGL | DIQMTQSPSS | FTFSD | SYISG | CARDR | RASQSV | SSLQS | QQYKSY |
| | VQPGGSLRLSC | LSASVGDRVT | FWMH | DSGYT | PYYYI | SRSLA | (SEQ | PVT |
| | AASGFTFSDEW | ITCRASQSVS | (SEQ | NYA | MDVW | (SEQ | ID NO: | (SEQ |
| | MHWVRQAPGKG | RSLAWYQQKP | ID | (SEQ | (SEQ | ID NO: | 362) | ID NO: |
| | LEWISYISGDS | GKAPKLLIYA | NO: | ID | ID | 361) | | 363) |
| | GYTNYADSVKG | ASSLQSGVPS | 359) | NO: | NO: | | | |
| | RFTISRDNSKN | RFSGSGSGTD | | 170) | 1431) | | | |
| | TLYLQMNSLRA | FTLTISSLQP | | | | | | |
| | EDTAVYYCARD | EDFATYYCQQ | | | | | | |
| | RPYYYIMDVWG | YKSYPVTFGQ | | | | | | |
| | KGTTVTVSS | GTKVEIK | | | | | | |
| | (SEQ ID NO: | (SEQ ID | | | | | | |
| | 1387) | NO: 592) | | | | | | |
| MIAB170 | EVQLLESGGGL | DIQMTQSPSS | FTFSD | SYISG | CARDR | RASQSV | SSLQS | QQYKSY |
| | VQPGGSLRLSC | LSASVGDRVT | FWMH | DSGYT | PYYYW | SRSLA | (SEQ | PVT |
| | AASGETFSDEW | ITCRASQSVS | (SEQ | NYA | MDVW | (SEQ | ID NO: | (SEQ |
| | MHWVRQAPGKG | RSLAWYQQKP | ID | (SEQ | (SEQ | ID NO: | 362) | ID NO: |
| | LEWISYISGDS | GKAPKLLIYA | NO: | ID | ID | 361) | | 363) |
| | GYTNYADSVKG | ASSLQSGVPS | 359) | NO: | NO: | | | |
| | RFTISRDNSKN | RFSGSGSGTD | | 170) | 1432) | | | |
| | TLYLQMNSLRA | FTLTISSLQP | | | | | | |
| | EDTAVYYCARD | EDFATYYCQQ | | | | | | |
| | RPYYYWMDVWG | YKSYPVTFGQ | | | | | | |
| | KGTTVTVSS | GTKVEIK | | | | | | |
| | (SEQ ID NO: | (SEQ ID | | | | | | |
| | 1388) | NO: 592) | | | | | | |
| MIAB171 | EVQLLESGGGL | DIQMTQSPSS | FTFSD | SYISG | CARDR | RASQSV | SSLQS | QQYKSY |
| | VQPGGSLRLSC | LSASVGDRVT | FWMH | DSGYT | PSYYY | SRSLA | (SEQ | PVT |
| | AASGFTFSDFW | ITCRASQSVS | (SEQ | NYA | MDVW | (SEQ | ID NO: | (SEQ |
| | MHWVRQAPGKG | RSLAWYQQKP | ID | (SEQ | (SEQ | ID NO: | 362) | ID NO: |
| | LEWISYISGDS | GKAPKLLIYA | NO: | ID | ID | 361) | | 363) |
| | GYTNYADSVKG | ASSLQSGVPS | 359) | NO: | NO: | | | |
| | RFTISRDNSKN | RFSGSGSGTD | | 170) | 1433) | | | |
| | TLYLQMNSLRA | FTLTISSLQP | | | | | | |
| | EDTAVYYCARD | EDFATYYCQQ | | | | | | |
| | RPSYYYMDVWG | YKSYPVTFGQ | | | | | | |
| | KGTTVTVSS | GTKVEIK | | | | | | |
| | (SEQ ID NO: | (SEQ ID | | | | | | |
| | 1389) | NO: 592) | | | | | | |
| MIAB172 | EVQLLESGGGL | DIQMTQSPSS | FTESD | SYISG | CARDR | RASQSV | SSLQS | QQYKSY |
| | VQPGGSLRLSC | LSASVGDRVT | FWMH | DSGYT | PTYYY | SRSLA | (SEQ | PVT |
| | AASGFTFSDEW | ITCRASQSVS | (SEQ | NYA | MDVW | (SEQ | ID NO: | (SEQ |
| | MHWVRQAPGKG | RSLAWYQQKP | ID | (SEQ | (SEQ | ID NO: | 362) | ID NO: |
| | LEWISYISGDS | GKAPKLLIYA | NO: | ID | ID | 361) | | 363) |
| | GYTNYADSVKG | ASSLQSGVPS | 359) | NO: | NO: | | | |
| | RFTISRDNSKN | RFSGSGSGTD | | 170) | 1434) | | | |
| | TLYLQMNSLRA | FTLTISSLQP | | | | | | |
| | EDTAVYYCARD | EDFATYYCQQ | | | | | | |
| | RPTYYYMDVWG | YKSYPVTFGQ | | | | | | |
| | KGTTVTVSS | GTKVEIK | | | | | | |
| | (SEQ ID NO: | (SEQ ID | | | | | | |
| | 1390) | NO: 592) | | | | | | |
| MIAB173 | EVQLLESGGGL | DIQMTQSPSS | FTFSD | SYISG | CARDR | RASQSV | SSLQS | QQYKSY |
| | VQPGGSLRLSC | LSASVGDRVT | FWMH | DSGYT | PYYYY | SRSLA | (SEQ | PVT |
| | AASGFTFSDFW | ITCRASQSVS | (SEQ | NYA | MDVW | (SEQ | ID NO: | (SEQ |
| | MHWVRQAPGKG | RSLAWYQQKP | ID | (SEQ | (SEQ | ID NO: | 362) | ID NO: |
| | LEWISYISGDS | GKAPKLLIYA | NO: | ID | ID | 361) | | 363) |
| | GYTNYADSVKG | ASSLQSGVPS | 359) | NO: | NO: | | | |
| | RFTISRDNSKN | RFSGSGSGTD | | 170) | 360) | | | |
| | TLYLQMNSLRA | FTLTISSLQP | | | | | | |
| | EDTAVYYCARD | EDFATYYCQQ | | | | | | |
| | RPYYYYMDVWG | YKSYPVTFGQ | | | | | | |
| | KGTTVTVSS | GTKVEIK | | | | | | |
| | (SEQ ID NO: | (SEQ ID | | | | | | |
| | 591) | NO: 592) | | | | | | |
| MIAB174 | EVQLLESGGGL | DIQMTQSPSS | FTFSD | SYISG | CARDR | RASQSV | SSLQS | QQYKSY |
| | VQPGGSLRLSC | LSASVGDRVT | YWMH | DSGYT | PYYYY | SRSLA | (SEQ | PVT |
| | AASGFTFSDYW | ITCRASQSVS | (SEQ | NYA | MDVW | (SEQ | ID NO: | (SEQ |
| | MHWVRQAPGKG | RSLAWYQQKP | ID | (SEQ | (SEQ | ID NO: | 362) | ID NO: |
| | LEWISYISGDS | GKAPKLLIYA | NO: | ID | ID | 361) | | 363) |
| | GYTNYADSVKG | ASSLQSGVPS | 1435) | NO: | NO: | | | |
| | RFTISRDNSKN | RFSGSGSGTD | | 170) | 360) | | | |
| | TLYLQMNSLRA | FTLTISSLQP | | | | | | |
| | EDTAVYYCARD | EDFATYYCQQ | | | | | | |
| | RPYYYYMDVWG | YKSYPVTFGQ | | | | | | |
| | KGTTVTVSS | GTKVEIK | | | | | | |
| | (SEQ ID NO: | (SEQ ID | | | | | | |
| | 1391) | NO: 592) | | | | | | |
| MIAB175 | EVQLLESGGGL | DIQMTQSPSS | FTFSS | SYISG | CARDR | RASQSV | SSLQS | QQYKSY |
| | VQPGGSLRLSC | LSASVGDRVT | YWMH | DSGYT | PYYYY | SRSLA | (SEQ | PVT |
| | AASGFTESSYW | ITCRASQSVS | (SEQ | NYA | MDVW | (SEQ | ID NO: | (SEQ |
| | MHWVRQAPGKG | RSLAWYQQKP | ID | (SEQ | (SEQ | ID NO: | 362) | ID NO: |
| | LEWISYISGDS | GKAPKLLIYA | NO: | ID | ID | 361) | | 363) |
| | GYTNYADSVKG | ASSLQSGVPS | 83) | NO: | NO: | | | |
| | RFTISRDNSKN | RFSGSGSGTD | | 170) | 360) | | | |
| | TLYLQMNSLRA | FTLTISSLQP | | | | | | |
| | EDTAVYYCARD | EDFATYYCQQ | | | | | | |
| | RPYYYYMDVWG | YKSYPVTFGQ | | | | | | |
| | KGTTVTVSS | GTKVEIK | | | | | | |
| | (SEQ ID NO: | (SEQ ID | | | | | | |
| | 1392) | NO: 592) | | | | | | |
| MIAB176 | EVQLLESGGGL | DIQMTQSPSS | FTFSD | SAISG | CARDR | RASQSV | SSLQS | QQYKSY |
| | VQPGGSLRLSC | LSASVGDRVT | FWMH | SSGST | PYYYY | SRSLA | (SEQ | PVT |
| | AASGFTFSDFW | ITCRASQSVS | (SEQ | YYA | MDVW | (SEQ | ID NO: | (SEQ |
| | MHWVRQAPGKG | RSLAWYQQKP | ID | (SEQ | (SEQ | ID NO: | 362) | ID NO: |
| | LEWISAISGSS | GKAPKLLIYA | NO: | ID | ID | 361) | | 363) |
| | GSTYYADSVKG | ASSLQSGVPS | 359) | NO: | NO: | | | |
| | RFTISRDNSKN | RFSGSGSGTD | | 1436) | 360) | | | |
| | TLYLQMNSLRA | FTLTISSLQP | | | | | | |
| | EDTAVYYCARD | EDFATYYCQQ | | | | | | |
| | RPYYYYMDVWG | YKSYPVTFGQ | | | | | | |
| | KGTTVTVSS | GTKVEIK | | | | | | |
| | (SEQ ID NO: | SEQ ID | | | | | | |
| | 1393) | NO: 592) | | | | | | |
| MIAB177 | EVQLLESGGGL | DIQMTQSPSS | FTFSD | SAISG | CARDR | RASQSV | SSLQS | QQYKSY |
| | VQPGGSLRLSC | LSASVGDRVT | FWMH | SGGST | PYYYY | SRSLA | (SEQ | PVT |
| | AASGFTFSDFW | ITCRASQSVS | (SEQ | YYA | MDVW | (SEQ | ID NO: | (SEQ |
| | MHWVRQAPGKG | RSLAWYQQKP | ID | (SEQ | (SEQ | ID NO: | 362) | ID NO: |
| | LEWVSAISGSG | GKAPKLLIYA | NO: | ID | ID | 361) | | 363) |
| | GSTYYADSVKG | ASSLQSGVPS | 359) | NO: | NO: | | | |
| | RFTISRDNSKN | RFSGSGSGTD | | 103) | 360) | | | |
| | TLYLQMNSLRA | FTLTISSLQP | | | | | | |
| | EDTAVYYCARD | EDFATYYCQQ | | | | | | |
| | RPYYYYMDVWG | YKSYPVTFGQ | | | | | | |
| | KGTTVTVSS | GTKVEIK | | | | | | |
| | (SEQ ID NO: | (SEQ ID | | | | | | |
| | 1357) | NO: 592) | | | | | | |
| MIAB178 | EVQLLESGGGL | DIQMTQSPSS | FTESS | SAISG | CARDR | RASQSV | SSLQS | QQYKSY |
| | VQPGGSLRLSC | LSASVGDRVT | YWMH | SSGST | PYYYY | SRSLA | (SEQ | PVT |
| | AASGFTESSYW | ITCRASQSVS | (SEQ | YYA | MDVW | (SEQ | ID NO: | (SEQ |
| | MHWVRQAPGKG | RSLAWYQQKP | ID | (SEQ | (SEQ | ID NO: | 362) | ID NO: |
| | LEWISAISGSS | GKAPKLLIYA | NO: | ID | ID | 361) | | 363) |
| | GSTYYADSVKG | ASSLQSGVPS | 83) | NO: | NO: | | | |
| | RFTISRDNSKN | RFSGSGSGTD | | 1436) | 360) | | | |
| | TLYLQMNSLRA | FTLTISSLQP | | | | | | |
| | EDTAVYYCARD | EDFATYYCQQ | | | | | | |
| | RPYYYYMDVWG | YKSYPVTFGQ | | | | | | |
| | KGTTVTVSS | GTKVEIK | | | | | | |
| | (SEQ ID NO: | (SEQ ID | | | | | | |
| | 1394) | NO: 592) | | | | | | |
| MIAB179 | EVQLLESGGGL | DIQMTQSPSS | FTFSS | SAISG | CARDR | RASQSI | SSLQS | QQYKSY |
| | VQPGGSLRLSC | LSASVGDRVT | YWMH | SGGST | PYYYY | SRYLA | (SEQ | PVT |
| | AASGFTFSSYW | ITCRASQSIS | (SEQ | YYA | MDVW | (SEQ | ID NO: | (SEQ |
| | MHWVRQAPGKG | RYLAWYQQKP | ID | (SEQ | (SEQ | ID NO: | 362) | ID NO: |
| | LEWVSAISGSG | GKAPKLLIYA | NO: | ID | ID | 1413) | | 363) |
| | GSTYYADSVKG | ASSLQSGVPS | 83) | NO: | NO: | | | |
| | RFTISRDNSKN | RFSGSGSGTD | | 103) | 360) | | | |
| | TLYLQMNSLRA | FTLTISSLQP | | | | | | |
| | EDTAVYYCARD | EDFATYYCQQ | | | | | | |
| | RPYYYYMDVWG | YKSYPVTFGQ | | | | | | |
| | KGTTVTVSS | GTKVEIK | | | | | | |
| | (SEQ ID NO: | (SEQ ID | | | | | | |
| | 1395) | NO: 1368) | | | | | | |
| MIAB180 | EVQLLESGGGL | DIQMTQSPSS | FTFSS | SAISG | CARDR | RASQSV | SSLQS | QQYKSY |
| | VQPGGSLRLSC | LSASVGDRVT | YWMH | SGGST | PYYYY | SRSLA | SEQ | PVT |
| | AASGFTESSYW | ITCRASQSVS | (SEQ | YYA | MDVW | (SEQ | ID NO: | (SEQ |
| | MHWVRQAPGKG | RSLAWYQQKP | ID | (SEQ | (SEQ | ID NO: | 362) | ID NO: |
| | LEWVSAISGSG | GKAPKLLIYA | NO: | ID | ID | 361) | | 363) |
| | GSTYYADSVKG | ASSLQSGVPS | 83) | NO: | NO: | | | |
| | RFTISRDNSKN | RFSGSGSGTD | | 103) | 360) | | | |
| | TLYLQMNSLRA | FTLTISSLQP | | | | | | |
| | EDTAVYYCARD | EDFATYYCQQ | | | | | | |
| | RPYYYYMDVWG | YKSYPVTFGQ | | | | | | |
| | KGTTVTVSS | GTKVEIK | | | | | | |
| | (SEQ ID NO: | (SEQ ID | | | | | | |
| | 1395) | NO: 592) | | | | | | |
| MIAB181 | EVQLLESGGGL | DIQMTQSPSS | FTFSS | SAISG | CARDR | RASQSI | SSLQS | QQYKSY |
| | VQPGGSLRLSC | LSASVGDRVT | YWMH | SGGST | PYYYY | SRYLA | (SEQ | PVT |
| | AASGFTESSYW | ITCRASQSIS | (SEQ | YYA | MDVW | (SEQ | ID NO: | (SEQ |
| | MHWVRQAPGKG | RYLAWYQQKP | ID | (SEQ | (SEQ | ID NO: | 362) | ID NO: |
| | LEWVSAISGSG | GKAPKLLIYA | NO: | ID | ID | 1413) | | 363) |
| | GSTYYADSVKG | ASSLQSGVPS | 83) | NO: | NO: | | | |
| | RFTISRDNSKN | RFSGSGSGTD | | 103) | 360) | | | |
| | TLYLQMNSLRA | FTLTISSLQP | | | | | | |
| | EDTAVYYCARD | EDFATYYCQQ | | | | | | |
| | RPYYYYMDVWG | YKSYPVTFGQ | | | | | | |
| | KGTTVTVSS | GTKVEIK | | | | | | |
| | (SEQ ID NO: | (SEQ ID | | | | | | |
| | 1395) | NO: 1368) | | | | | | |
| MIAB182 | EVQLLESGGGL | DIQMTQSPSS | FTFSS | SAISG | CARDR | RASQSI | SSLQS | QQYKSY |
| | VQPGGSLRLSC | LSASVGDRVT | YWMH | SGGST | PYYYY | SRSLA | (SEQ | PVT |
| | AASGFTFSSYW | ITCRASQSIS | (SEQ | YYA | MDVW | (SEQ | ID NO: | (SEQ |
| | MHWVRQAPGKG | RSLAWYQQKP | ID | (SEQ | (SEQ | ID NO: | 362) | ID NO: |
| | LEWVSAISGSG | GKAPKLLIYA | NO: | ID | ID | 1408) | | 363) |
| | GSTYYADSVKG | ASSLQSGVPS | 83) | NO: | NO: | | | |
| | RFTISRDNSKN | RFSGSGSGTD | | 103) | 360) | | | |
| | TLYLQMNSLRA | FTLTISSLQP | | | | | | |
| | EDTAVYYCARD | EDFATYYCQQ | | | | | | |
| | RPYYYYMDVWG | YKSYPVTFGQ | | | | | | |
| | KGTTVTVSS | GTKVEIK | | | | | | |
| | (SEQ ID NO: | (SEQ ID | | | | | | |
| | 1395) | NO: 1363) | | | | | | |
| MIAB183 | EVQLLESGGGL | DIQMTQSPSS | FTFSS | SAISG | CARDR | RASQSV | SSLQS | QQYKSY |
| | VQPGGSLRLSC | LSASVGDRVT | YWMH | SGGST | PYYYY | SSSLA | (SEQ | PVT |
| | AASGFTESSYW | ITCRASQSVS | (SEQ | YYA | MDVW | (SEQ | ID NO: | (SEQ |
| | MHWVRQAPGKG | SSLAWYQQKP | ID | (SEQ | (SEQ | ID NO: | 362) | ID NO: |
| | LEWVSAISGSG | GKAPKLLIYA | NO: | ID | ID | 1409) | | 363) |
| | GSTYYADSVKG | ASSLQSGVPS | 83) | NO: | NO: | | | |
| | RFTISRDNSKN | RFSGSGSGTD | | 103) | 360) | | | |
| | TLYLQMNSLRA | FTLTISSLQP | | | | | | |
| | EDTAVYYCARD | EDFATYYCQQ | | | | | | |
| | RPYYYYMDVWG | YKSYPVTFGQ | | | | | | |
| | KGTTVTVSS | GTKVEIK | | | | | | |
| | (SEQ ID NO: | (SEQ ID | | | | | | |
| | 1395) | NO: 1364) | | | | | | |
| MIAB184 | EVQLLESGGGL | DIQMTQSPSS | FTFSS | SAISG | CARDR | RASQSI | SSLQS | QQYKSY |
| | VQPGGSLRLSC | LSASVGDRVT | YWMH | SGGST | PYYYY | SSSLA | (SEQ | PVT |
| | AASGFTESSYW | ITCRASQSIS | (SEQ | YYA | MDVW | (SEQ | ID NO: | (SEQ |
| | MHWVRQAPGKG | SSLAWYQQKP | ID | (SEQ | (SEQ | ID NO: | 362) | ID NO: |
| | LEWVSAISGSG | GKAPKLLIYA | NO: | ID | ID | 1412) | | 363) |
| | GSTYYADSVKG | ASSLQSGVPS | 83) | NO: | NO: | | | |
| | RFTISRDNSKN | RFSGSGSGTD | | 103) | 360) | | | |
| | TLYLQMNSLRA | FTLTISSLOP | | | | | | |
| | EDTAVYYCARD | EDFATYYCQQ | | | | | | |
| | RPYYYYMDVWG | YKSYPVTFGQ | | | | | | |
| | KGTTVTVSS | GTKVEIK | | | | | | |
| | (SEQ ID NO: | (SEQ ID | | | | | | |
| | 1395) | NO: 1367) | | | | | | |
| MIAB185 | EVQLLESGGGL | DIQMTQSPSS | FTFSS | SYISG | CARDR | RASQSI | SSLQS | QQYKSY |
| | VQPGGSLRLSC | LSASVGDRVT | YWMH | DSGYT | PYYYI | SRSLA | (SEQ | PVT |
| | AASGFTESSYW | ITCRASQSIS | (SEQ | NYA | MDVW | (SEQ | ID NO: | SEQ |
| | MHWVRQAPGKG | RSLAWYQQKP | ID | (SEQ | (SEQ | ID NO: | 362) | ID NO: |
| | LEWISYISGDS | GKAPKLLIYA | NO: | ID | ID | 1408) | | 363) |
| | GYTNYADSVKG | ASSLQSGVPS | 83) | NO: | NO: | | | |
| | RFTISRDNSKN | RFSGSGSGTD | | 170) | 1431) | | | |
| | TLYLQMNSLRA | FTLTISSLQP | | | | | | |
| | EDTAVYYCARD | EDFATYYCQQ | | | | | | |
| | RPYYYIMDVWG | YKSYPVTFGQ | | | | | | |
| | KGTTVTVSS | GTKVEIK | | | | | | |
| | (SEQ ID NO: | (SEQ ID | | | | | | |
| | 1396) | NO: 1363) | | | | | | |
| MIAB186 | EVQLLESGGGL | DIQMTQSPSS | FTFSS | SYISG | CARDR | RASQSV | SSLQS | QQYKSY |
| | VQPGGSLRLSC | LSASVGDRVT | YWMH | DSGYT | PYYYI | SSSLA | (SEQ | PVT |
| | AASGFTESSYW | ITCRASQSVS | (SEQ | NYA | MDVW | (SEQ | ID NO: | (SEQ |
| | MHWVRQAPGKG | SSLAWYQQKP | ID | (SEQ | (SEQ | ID NO: | 362) | ID NO: |
| | LEWISYISGDS | GKAPKLLIYA | NO: | ID | ID | 1409) | | 363) |
| | GYTNYADSVKG | ASSLQSGVPS | 83) | NO: | NO: | | | |
| | RFTISRDNSKN | RFSGSGSGTD | | 170) | 1431) | | | |
| | TLYLQMNSLRA | FTLTISSLQP | | | | | | |
| | EDTAVYYCARD | EDFATYYCQQ | | | | | | |
| | RPYYYIMDVWG | YKSYPVTFGQ | | | | | | |
| | KGTTVTVSS | GTKVEIK | | | | | | |
| | (SEQ ID NO: | (SEQ ID | | | | | | |
| | 1396) | NO: 1364) | | | | | | |
| MIAB187 | EVQLLESGGGL | DIQMTQSPSS | FTFSS | SYISG | CARDR | RASQSI | SSLQS | QQYKSY |
| | VQPGGSLRLSC | LSASVGDRVT | YWMH | DSGYT | PYYYI | SSSLA | (SEQ | PVT |
| | AASGFTESSYW | ITCRASQSIS | (SEQ | NYA | MDVW | (SEQ | ID NO: | (SEQ |
| | MHWVRQAPGKG | SSLAWYQQKP | ID | (SEQ | (SEQ | ID NO: | 362) | ID NO: |
| | LEWISYISGDS | GKAPKLLIYA | NO: | ID | ID | 1412) | | 363) |
| | GYTNYADSVKG | ASSLQSGVPS | 83) | NO: | NO: | | | |
| | RFTISRDNSKN | RFSGSGSGTD | | 170) | 1431) | | | |
| | TLYLQMNSLRA | FTLTISSLQP | | | | | | |
| | EDTAVYYCARD | EDFATYYCQQ | | | | | | |
| | RPYYYIMDVWG | YKSYPVTFGQ | | | | | | |
| | KGTTVTVSS | GTKVEIK | | | | | | |
| | (SEQ ID NO: | (SEQ ID | | | | | | |
| | 1396) | NO: 1367) | | | | | | |
| MIAB188 | EVQLLESGGGL | DIQMTQSPSS | FTFSD | SAISG | CARDR | RASQSI | SSLQS | QQYKSY |
| | VQPGGSLRLSC | LSASVGDRVT | FWMH | SGGST | PYYYI | SRSLA | (SEQ | PVT |
| | AASGFTFSDFW | ITCRASQSIS | (SEQ | YYA | MDVW | (SEQ | ID NO: | (SEQ |
| | MHWVRQAPGKG | RSLAWYQQKP | ID | (SEQ | (SEQ | ID NO: | 362) | ID NO: |
| | LEWVSAISGSG | GKAPKLLIYA | NO: | ID | ID | 1408) | | 363) |
| | GSTYYADSVKG | ASSLQSGVPS | 359) | NO: | NO: | | | |
| | RFTISRDNSKN | RFSGSGSGTD | | 103) | 1431) | | | |
| | TLYLQMNSLRA | FTLTISSLQP | | | | | | |
| | EDTAVYYCARD | EDFATYYCQQ | | | | | | |
| | RPYYYIMDVWG | YKSYPVTFGQ | | | | | | |
| | KGTTVTVSS | GTKVEIK | | | | | | |
| | (SEQ ID NO: | (SEQ ID | | | | | | |
| | 1397) | NO: 1363) | | | | | | |
| MIAB189 | EVQLLESGGGL | DIQMTQSPSS | FTFSD | SAISG | CARDR | RASQSV | SSLQS | QQYKSY |
| | VQPGGSLRLSC | LSASVGDRVT | FWMH | SGGST | PYYYI | SSSLA | (SEQ | PVT |
| | AASGFTFSDFW | ITCRASQSVS | (SEQ | YYA | MDVW | (SEQ | ID NO: | (SEQ |
| | MHWVRQAPGKG | SSLAWYQQKP | ID | (SEQ | (SEQ | ID NO: | 362) | ID NO: |
| | LEWVSAISGSG | GKAPKLLIYA | NO: | ID | ID | 1409) | | 363) |
| | GSTYYADSVKG | ASSLQSGVPS | 359) | NO: | NO: | | | |
| | RFTISRDNSKN | RFSGSGSGTD | | 103) | 1431) | | | |
| | TLYLQMNSLRA | FTLTISSLQP | | | | | | |
| | EDTAVYYCARD | EDFATYYCQQ | | | | | | |
| | RPYYYIMDVWG | YKSYPVTFGQ | | | | | | |
| | KGTTVTVSS | GTKVEIK | | | | | | |
| | (SEQ ID NO: | (SEQ ID | | | | | | |
| | 1397) | NO: 1364) | | | | | | |
| MIAB190 | EVQLLESGGGL | DIQMTQSPSS | FTFSD | SAISG | CARDR | RASQSI | SSLQS | QQYKSY |
| | VQPGGSLRLSC | LSASVGDRVT | FWMH | SGGST | PYYYI | SSSLA | (SEQ | PVT |
| | AASGFTESDEW | ITCRASQSIS | (SEQ | YYA | MDVW | (SEQ | ID NO: | (SEQ |
| | MHWVRQAPGKG | SSLAWYQQKP | ID | (SEQ | (SEQ | ID NO: | 362) | ID NO: |
| | LEWVSAISGSG | GKAPKLLIYA | NO: | ID | ID | 1412) | | 363) |
| | GSTYYADSVKG | ASSLQSGVPS | 359) | NO: | NO: | | | |
| | RFTISRDNSKN | RFSGSGSGTD | | 103) | 1431) | | | |
| | TLYLQMNSLRA | FTLTISSLQP | | | | | | |
| | EDTAVYYCARD | EDFATYYCQQ | | | | | | |
| | RPYYYIMDVWG | YKSYPVTFGQ | | | | | | |
| | KGTTVTVSS | GTKVEIK | | | | | | |
| | (SEQ ID NO: | SEQ ID | | | | | | |
| | 1397) | NO: 1367) | | | | | | |
| MIAB191 | EVQLLESGGGL | DIQMTQSPSS | FTESS | SAISG | CARDR | RASQSI | SSLQS | QQYKSY |
| | VQPGGSLRLSC | LSASVGDRVT | YWMH | SGGST | PYYYI | SRSLA | (SEQ | PVT |
| | AASGFTFSSYW | ITCRASQSIS | (SEQ | YYA | MDVW | (SEQ | ID NO: | (SEQ |
| | MHWVRQAPGKG | RSLAWYQQKP | ID | (SEQ | (SEQ | ID NO: | 362) | ID NO: |
| | LEWVSAISGSG | GKAPKLLIYA | NO: | ID | ID | 1408) | | 363) |
| | GSTYYADSVKG | ASSLQSGVPS | 83) | NO: | NO: | | | |
| | RFTISRDNSKN | RFSGSGSGTD | | 103) | 1431) | | | |
| | TLYLQMNSLRA | FTLTISSLQP | | | | | | |
| | EDTAVYYCARD | EDFATYYCQQ | | | | | | |
| | RPYYYIMDVWG | YKSYPVTFGQ | | | | | | |
| | KGTTVTVSS | GTKVEIK | | | | | | |
| | (SEQ ID NO: | (SEQ ID | | | | | | |
| | 1398) | NO: 1363) | | | | | | |
| MIAB192 | EVQLLESGGGL | DIQMTQSPSS | FTESS | SAISG | CARDR | RASQSV | SSLQS | QQYKSY |
| | VQPGGSLRLSC | LSASVGDRVT | YWMH | SGGST | PYYYI | SSSLA | (SEQ | PVT |
| | AASGFTESSYW | ITCRASQSVS | (SEQ | YYA | MDVW | (SEQ | ID NO: | (SEQ |
| | MHWVRQAPGKG | SSLAWYQQKP | ID | (SEQ | (SEQ | ID NO: | 362) | ID NO: |
| | LEWVSAISGSG | GKAPKLLIYA | NO: | ID | ID | 1409) | | 363) |
| | GSTYYADSVKG | ASSLQSGVPS | 83) | NO: | NO: | | | |
| | RFTISRDNSKN | RFSGSGSGTD | | 103) | 1431) | | | |
| | TLYLQMNSLRA | FTLTISSLQP | | | | | | |
| | EDTAVYYCARD | EDFATYYCQQ | | | | | | |
| | RPYYYIMDVWG | YKSYPVTFGQ | | | | | | |
| | KGTTVTVSS | GTKVEIK | | | | | | |
| | (SEQ ID NO: | (SEQ ID | | | | | | |
| | 1398) | NO: 1364) | | | | | | |
| MIAB193 | EVQLLESGGGL | DIQMTQSPSS | FTFSS | SAISG | CARDR | RASQSI | SSLQS | QQYKSY |
| | VQPGGSLRLSC | LSASVGDRVT | YWMH | SGGST | PYYYI | SSSLA | (SEQ | PVT |
| | AASGFTESSYW | ITCRASQSIS | (SEQ | YYA | MDVW | (SEQ | ID NO: | (SEQ |
| | MHWVRQAPGKG | SSLAWYQQKP | ID | (SEQ | (SEQ | ID NO: | 362) | ID NO: |
| | LEWVSAISGSG | GKAPKLLIYA | NO: | ID | ID | 1412) | | 363) |
| | GSTYYADSVKG | ASSLQSGVPS | 83) | NO: | NO: | | | |
| | RFTISRDNSKN | RFSGSGSGTD | | 103) | 1431) | | | |
| | TLYLQMNSLRA | FTLTISSLOP | | | | | | |
| | EDTAVYYCARD | EDFATYYCQQ | | | | | | |
| | RPYYYIMDVWG | YKSYPVTFGQ | | | | | | |
| | KGTTVTVSS | GTKVEIK | | | | | | |
| | (SEQ ID NO: | (SEQ ID | | | | | | |
| | 1398) | NO: 1367) | | | | | | |
| MIAB194 | EVQLLESGGGL | DIQMTQSPSS | FTFSD | SYISG | CARDR | RASQSI | SSLQS | QQYKSY |
| | VQPGGSLRLSC | LSASVGDRVT | FWMH | DSGYT | PYYYI | SRSLA | (SEQ | PVT |
| | AASGFTFSDFW | ITCRASQSIS | (SEQ | NYA | MDVW | (SEQ | ID NO: | (SEQ |
| | MHWVRQAPGKG | RSLAWYQQKP | ID | (SEQ | (SEQ | ID NO: | 362) | ID NO: |
| | LEWISYISGDS | GKAPKLLIYA | NO: | ID | ID | 1408) | | 363) |
| | GYTNYADSVKG | ASSLQSGVPS | 359) | NO: | NO: | | | |
| | RFTISRDNSKN | RFSGSGSGTD | | 170) | 1431) | | | |
| | TLYLQMNSLRA | FTLTISSLOP | | | | | | |
| | EDTAVYYCARD | EDFATYYCQQ | | | | | | |
| | RPYYYIMDVWG | YKSYPVTFGQ | | | | | | |
| | KGTTVTVSS | GTKVEIK | | | | | | |
| | (SEQ ID NO: | (SEQ ID NO: | | | | | | |
| | 1387) | 1363) | | | | | | |
| MIAB195 | EVQLLESGGGL | DIQMTQSPSS | FTFSD | SYISG | CARDR | RASQSV | SSLQS | QQYKSY |
| | VQPGGSLRLSC | LSASVGDRVT | FWMH | DSGYT | PYYYI | SSSLA | (SEQ | PVT |
| | AASGFTFSDFW | ITCRASQSVS | (SEQ | NYA | MDVW | (SEQ | ID NO: | (SEQ |
| | MHWVRQAPGKG | SSLAWYQQKP | ID | (SEQ | (SEQ | ID NO: | 362) | ID NO: |
| | LEWISYISGDS | GKAPKLLIYA | NO: | ID | ID | 1409) | | 363) |
| | GYTNYADSVKG | ASSLQSGVPS | 359) | NO: | NO: | | | |
| | RFTISRDNSKN | RFSGSGSGTD | | 170) | 1431) | | | |
| | TLYLQMNSLRA | FTLTISSLQP | | | | | | |
| | EDTAVYYCARD | EDFATYYCQQ | | | | | | |
| | RPYYYIMDVWG | YKSYPVTFGQ | | | | | | |
| | KGTTVTVSS | GTKVEIK | | | | | | |
| | (SEQ ID NO: | (SEQ ID | | | | | | |
| | 1387) | NO: 1364) | | | | | | |
| MIAB196 | EVQLLESGGGL | DIQMTQSPSS | FTFSD | SYISG | CARDR | RASQSI | SSLQS | QQYKSY |
| | VQPGGSLRLSC | LSASVGDRVT | FWMH | DSGYT | PYYYI | SSSLA | (SEQ | PVT |
| | AASGFTFSDFW | ITCRASQSIS | (SEQ | NYA | MDVW | SEQ | ID NO: | (SEQ |
| | MHWVRQAPGKG | SSLAWYQQKP | ID | (SEQ | (SEQ | ID NO: | 362) | ID NO: |
| | LEWISYISGDS | GKAPKLLIYA | NO: | ID | ID | 1412) | | 363) |
| | GYTNYADSVKG | ASSLQSGVPS | 359) | NO: | NO: | | | |
| | RFTISRDNSKN | RFSGSGSGTD | | 170) | 1431) | | | |
| | TLYLQMNSLRA | FTLTISSLQP | | | | | | |
| | EDTAVYYCARD | EDFATYYCQQ | | | | | | |
| | RPYYYIMDVWG | YKSYPVTFGQ | | | | | | |
| | KGTTVTVSS | GTKVEIK | | | | | | |
| | (SEQ ID NO: | (SEQ ID | | | | | | |
| | 1387) | NO: 1367) | | | | | | |
| MIAB197 | EVQLLESGGGL | DIQMTQSPSS | FTFSD | SYISG | CARDR | RASQSI | SSLQS | QQYKSY |
| | VQPGGSLRLSC | LSASVGDRVT | FWMH | DSGYT | PYYYI | SRSLA | (SEQ | PVT |
| | AASGFTFSDFW | ITCRASQSIS | (SEQ | NYA | MDVW | (SEQ | ID NO: | (SEQ |
| | MHWVRQAPGKG | RSLAWYQQKP | ID | (SEQ | (SEQ | ID NO: | 362) | ID NO: |
| | LEWISYISGDS | GKAPKLLIYA | NO: | ID | ID | 1408) | | 363) |
| | GYTNYADSVKG | ASSLQSGVPS | 359) | NO: | NO: | | | |
| | RFTISRDNSKN | RFSGSGSGTD | | 170) | 1431) | | | |
| | TLYLQMNSLRA | FTLTISSLQP | | | | | | |
| | EDTAVYYCARD | EDFATYYCQQ | | | | | | |
| | RPYYYIMDVWG | YKSYPVTFGQ | | | | | | |
| | KGTTVTVSS | GTKVEIK | | | | | | |
| | (SEQ ID NO: | (SEQ ID | | | | | | |
| | 1387) | NO: 1363) | | | | | | |
| MIAB198 | EVQLLESGGGI | DIQMTQSPSS | FTFSD | SYISG | CARDR | RASQSV | SSLQS | QQYKSY |
| | VQPGGSLRLSC | LSASVGDRVT | FWMH | DSGYT | PYYYI | SRSLA | SEQ | PVT |
| | AASGFTFSDFW | ITCRASQSVS | (SEQ | NYA | MDVW | (SEQ | ID NO: | (SEQ |
| | MHWVRQAPGKG | RSLAWYQQKP | ID | (SEQ | (SEQ | ID NO: | 362) | ID NO: |
| | LEWISYISGDS | GKAPKLLIYA | NO: | ID | ID | 361) | | 363) |
| | GYTNYADSVKG | ASSLQSGVPS | 359) | NO: | NO: | | | |
| | RFTISRDNSKN | RFSGSGSGTD | | 170) | 1431) | | | |
| | TLYLQMNSLRA | FTLTISSLQP | | | | | | |
| | EDTAVYYCARD | EDFATYYCQQ | | | | | | |
| | RPYYYIMDVWG | YKSYPVTFGQ | | | | | | |
| | KGTTVTVSS | GTKVEIK | | | | | | |
| | (SEQ ID NO: | (SEQ ID | | | | | | |
| | 1387) | NO: 592) | | | | | | |

[0336] In some embodiments, the MAdCAM antibody comprises one or more sequences, or a combination thereof, of the sequences presented in Table 9.

[0337] In some embodiments, the antibody is linked to another antibody or therapeutic. In some embodiments, the MAdCAM antibody is linked to a PD-1 antibody or an IL-2 mutein as provided herein or that is incorporated by reference.

[0338] In some embodiments, the variable light chain MAdCAM antibody comprises a mutation selected from the group comprising V29I; R31S; S32Y; A34N; Y91S; K92Y; Y94T; and V99R.

[0339] In some embodiments, the variable heavy chain MAdCAM antibody comprises a mutation selected from the group comprising D31S, F32Y, I48V, Y50A, D54S, Y57S, N59Y, Y103G, V29I, R31S; D31S, F32Y, I48V, Y50A, D54S, Y57S, N59Y, V29I, R31S; D31S, F32Y, I48V, Y50A, D54S, Y57S, N59Y, Y103G, V29I; D31S, F32Y, I48V, Y50A, D54S, Y57S, N59Y, V29I; D31S, F32Y, Y50A, D54S, S55G, Y57S, N59Y, Y103G, V29I, R31S; D31S, F32Y, Y50A, D54S, S55G, Y57S, N59Y, V29I, R31S; D31S, F32Y, Y50A, D54S, S55G, Y57S, N59Y, Y103G, V29I; D31S, F32Y, Y50A, D54S, S55G, Y57S, N59Y, V29I; D31S, F32Y, I48V, Y50A, D54S, S55G, Y57S, N59Y, Y103G, V29I, R31S; D31S, F32Y, I48V, Y50A, D54S, S55G, Y57S, N59Y, V29I, R31S; D31S, F32Y, I48V, Y50A, D54S, S55G, Y57S, N59Y, Y103G, V29I; D31S, F32Y, I48V, Y50A, D54S, S55G, Y57S, N59Y, V29I; D31S, F32Y, I48V, D54S, S55G, Y103G, V29I, R31S; D31S, F32Y, I48V, Y50A, D54S, S55G, Y57S, N59Y, Y105D, V29I, R31S; D31S, F32Y, I48V, D54S, S55G, Y105D, V29I, R31S; D31S, F32Y, I48V, Y50A, D54S, S55G, Y57S, N59Y, Y103G, V29I, R31S; D31S, F32Y, I48V, D54S, S55G, Y105D, V29I, R31S; D31S; F32Y; W33A; H35S; I48V; Y50A; D54S; S55G; Y57S; N59Y; D60A; D60Q; N72A; N72Q; N82A; N82G; and N82Q.

[0340] In some embodiments, the MAdCAM antibody comprises one or more sequences as shown in Table 6 or Table 9. In some embodiments, the MAdCAM antibody comprises a combination of one or more sequence as shown in Table 6, or Table 9. In some embodiments, the MAdCAM antibody is in a scFV format as illustrated in Table 6. In some embodiments, the antibody comprises a CDR1 from any one of clones 1-66 of Table 6, a CDR2 from any one of clones 1-84, and a CDR3 from any one of clones 1-66 of Table 6. In some embodiments, the antibody comprises a LCDR1 from any one of clones 1-66 of Table 6, a LCDR2 from any one of clones 1-66 of Table 6, and a LCDR3 from any one of clones 1-66 of Table 6. In some embodiments, the MAdCAM antibody is in a Fab format as illustrated in Table 9. In some embodiments, the antibody comprises a HCDR1 from any one of clones MIAB128-198 of Table 9, a HCDR2 from any one of clones MIAB128-198 of Table 9, and a HCDR3 from any one of clones MIAB128-198 of Table 9. In some embodiments, the antibody comprises a LCDR1 from any one of clones MIAB128-198 of Table 9, a LCDR2 from any one of clones MIAB128-198 of Table 9, and a LCDR3 from any one of clones MIAB128-198 of Table 9. In some embodiments, the amino acid residues of the CDRs shown above contain mutations. In some embodiments, the CDRs contain 1, 2, 3, 4, 5, 6, 7, 8, 9, or 10 substitutions or mutations. In some embodiments, the substitution is a conservative substitution.

[0341] In some embodiments, the MAdCAM antibody has a VH region selected from any one of clones 1-84 of Table 7 and a VL region selected from any one of clones 1-84 as set forth in of Table 7. In some embodiments, the antibody comprises a CDR1 from any one of clones 1-84 of Table 7, a CDR2 from any one of clones 1-84, and a CDR3 from any one of clones 1-84 of Table 7. In some embodiments, the antibody comprises a LCDR1 from any one of clones 1-84 of Table 7, a LCDR2 from any one of clones 1-84 of Table 7, and a LCDR3 from any one of clones 1-84 of Table 7. In some embodiments, the MAdCAM antibody has a VH region selected from any one of clones MIAB128-198 of Table 9 and a VK region selected from any one of clones MIAB128-198 as set forth in of Table 9. In some embodiments, the antibody comprises a CDR1 from any one of clones MIAB128-198 of Table 9, a CDR2 from any one of clones MIAB128-198, and a CDR3 from any one of clones MIAB128-198 of Table 9. In some embodiments, the antibody comprises a LCDR1 from any one of clones MIAB128-198 of Table 9, a LCDR2 from any one of clones MIAB128-198 of Table 9, and a LCDR3 from any one of clones MIAB128-198 of Table 9.

[0342] In some embodiments, the amino acid residues of the CDRs shown above contain mutations. In some embodiments, the CDRs contain 1, 2, 3, 4, 5, 6, 7, 8, 9, or 10 substitutions or mutations. In some embodiments, the substitution is a conservative substitution.

[0343] In some embodiments, the molecule comprises an antibody that binds to MAdCAM. In some embodiments, the antibody comprises (i) a heavy chain variable region comprising heavy chain CDR1, CDR2, and CDR3 sequences, wherein the heavy chain CDR1 sequence has the amino acid sequence of any of the CDR1 sequences set forth in Table 6, Table 7, or Table 9; the heavy chain CDR2 has the amino acid sequence of any of the CDR2 sequences set forth in Table 6, Table 7, or Table 9, and the heavy chain CDR3 has the amino acid sequence of any of the CDR3 sequences set forth in Table 6, Table 7, or Table 9; or variants of any of the foregoing; and (ii) a light chain variable region comprising light chain CDR1, CDR2, and CDR3 sequences, wherein the light chain CDR1 sequence has the amino acid sequence of any of the LCDR1 sequences set forth in Table 6, Table 7, or Table 9; the light chain LCDR2 has the amino acid sequence of any of the LCDR2 sequences set forth in Table 6, Table 7, or Table 9, and the light chain CDR3 has the amino acid sequence of any of the LCDR3 sequences set forth in Table 6, Table 7, or Table 9, or variants of any of the foregoing.

[0344] In some embodiments, the antibody comprises a heavy chain variable region comprising heavy chain CDR1, CDR2, and CDR3 sequences, wherein the heavy chain CDR1, CDR2, and CDR3 sequences have the amino acid sequence as set forth in Antibody 6 of Table 6 or Antibody 6 of Table 7, or variants of any of the foregoing; and (ii) a light chain variable region comprising light chain CDR1, CDR2, and CDR3 sequences, wherein the light chain CDR1, CDR2, and CDR3 sequences have the amino acid sequence as set forth sequence as set forth in Antibody 6 of Table 6 or Antibody 6 of Table 7, or variants of any of the foregoing.

[0345] In some embodiments, the antibody comprises a heavy chain variable region comprising heavy chain CDR1, CDR2, and CDR3 sequences, wherein the heavy chain CDR1, CDR2, and CDR3 sequences have the amino acid sequence as set forth in Antibody 59 of Table 6 or Antibody 75 of Table 7, or variants of any of the foregoing; and (ii) a light chain variable region comprising light chain CDR1, CDR2, and CDR3 sequences, wherein the light chain CDR1, CDR2, and CDR3 sequences have the amino acid sequence as set forth sequence as set forth in Antibody 59 of Table 6 or Antibody 75 of Table 7, or variants of any of the foregoing.

[0346] In some embodiments, the antibody comprises a heavy chain variable region comprising heavy chain CDR1, CDR2, and CDR3 sequences, wherein the heavy chain CDR1, CDR2, and CDR3 sequences have the amino acid sequence as set forth in Antibody 63 of Table 6 or Antibody 79 of Table 7, or variants of any of the foregoing; and (ii) a light chain variable region comprising light chain CDR1, CDR2, and CDR3 sequences, wherein the light chain CDR1, CDR2, and CDR3 sequences have the amino acid sequence as set forth sequence as set forth in Antibody 63 of Table 6 or Antibody 79 of Table 7, or variants of any of the foregoing.

[0347] In some embodiments, the antibody comprises a heavy chain variable region comprising heavy chain CDR1, CDR2, and CDR3 sequences, wherein the heavy chain CDR1, CDR2, and CDR3 sequences have the amino acid sequence as set forth in MIAB197 of Table 9, or variants of any of the foregoing; and (ii) a light chain variable region comprising light chain CDR1, CDR2, and CDR3 sequences, wherein the light chain CDR1, CDR2, and CDR3 sequences have the amino acid sequence as set forth sequence as set forth in MIAB197 of Table 9, or variants of any of the foregoing.

[0348] These are non-limiting illustrative examples and the antibodies can have the CDRs as set forth in the tables provided herein and are explicitly referenced without writing out the previous paragraphs for each CDR set.

[0349] In some embodiments, the MAdCAM antibody comprises a VH and VL(VK) chain as provided herein, such as those listed in the Table 7, MAdCAM Antibody CDR Table 1, and Table 9. In some embodiments, the VH peptide comprises a sequence of SEQ ID NO: 414, 591, 599, or 1387. In some embodiments, the VK chain comprises a sequence of 415, 592, 600, or 1363. In some embodiments, the antibody comprises a VH of SEQ ID NO: 414 and a VK of SEQ ID NO: 415. In some embodiments, the antibody comprises a VH of SEQ ID NO: 591 and a VK of SEQ ID NO: 592. In some embodiments, the antibody comprises a VH of SEQ ID NO: 599 and a VK of SEQ ID NO: 600. In some embodiments, the antibody comprises a VH of SEQ ID NO: 1387 and a VK of SEQ ID NO: 1363. The VH and VK can also be in a scFV format as illustrated in the Table 6, Table 11, Table 12, and Table 14. The VH and VK can also be in a Fab format as illustrated in the Table 9.

[0350] In some embodiments, a therapeutic is provided comprising one or more of the following polypeptides:

| SEQ ID NO: | Sequence |
|---|---|
| 620 | EVQLLESGGGLVQPGGSLRLSCAASGFTENNYAFHWVRQAPGKGLEWVSRINSYGTSTTYADSVKGRF |
| | TISRDNSKNTLYLQMNSLRAEDTAVYYCAREGPVAGYWYFDLWGQGTLVTVSSASTKGPSVEPLAPSS |
| | KSTSGGTAALGCLVKDYFPEPVTVSWNSGALTSGVHTFPAVLQSSGLYSLSSVVTVPSSSLGTQTYIC |
| | NVNHKPSNTKVDKKVEPKSCDKTHTCPPCPAPEAAGAPSVELFPPKPKDTLMISRTPEVTCVVVDVSH |
| | EDPEVKENWYVDGVEVHNAKTKPREEQYNSTYRVVSVLTVLHQDWLNGKEYKCKVSNKALPAPIEKTI |
| | SKAKGQPREPQVYTLPPSREEMTKNQVSLTCLVKGFYPSDIAVEWESNGQPENNYKTTPPVLDSDGSF |
| | FLYSKLTVDKSRWQQGNVFSCSVMHEALHNHYTQKSLSLSPGGGGGSAPTSSSTKKTQLQLEHLLLDL |
| | QMILNGINNYKNPKLTRMLTFKFYMPKKATELKHLQCLEEELKPLEEALNLAPSKNFHLRPRDLISDI |
| | NVIVLELKGSETTFMCEYADETATIVEFINRWITFSQSIISTLT |
| 621 | DIQMTQSPSSLSASVGDRVTITCRASQIIGTNLAWYQQKPGKAPKLLIYGASSLQSGVPSRESGSGSG |
| | TDFTLTISSLQPEDFATYYCQQSYRLPFTFGQGTKVEIKRRTVAAPSVFIFPPSDEQLKSGTASVVCL |
| | LNNFYPREAKVQWKVDNALQSGNSQESVTEQDSKDSTYSLSSTLTLSKADYEKHKVYACEVTHQGLSS |
| | PVTKSENRGEC |
| 622 | EVQLLESGGGLVQPGGSLRLSCAASGFTFSDFWMHWVRQAPGKGLEWISYISGDSGYTNYADSVKGRE |
| | TISRDNSKNTLYLQMNSLRAEDTAVYYCARDRPYYYYMDVWGKGTTVTVSSASTKGPSVFPLAPSSKS |
| | TSGGTAALGCLVKDYFPEPVTVSWNSGALTSGVHTFPAVLQSSGLYSLSSVVTVPSSSLGTQTYICNV |
| | NHKPSNTKVDKKVEPKSCDKTHTCPPCPAPEAAGAPSVELFPPKPKDTLMISRTPEVTCVVVDVSHED |
| | PEVKENWYVDGVEVHNAKTKPREEQYNSTYRVVSVLTVLHQDWLNGKEYKCKVSNKALPAPIEKTISK |
| | AKGQPREPQVYTLPPSREEMTKNQVSLTCLVKGFYPSDIAVEWESNGQPENNYKTTPPVLDSDGSFFL |
| | YSKLTVDKSRWQQGNVFSCSVMHEALHNHYTQKSLSLSPGGGGGSAPTSSSTKKTQLQLEHLLLDLQM |
| | ILNGINNYKNPKLTRMLTFKFYMPKKATELKHLQCLEEELKPLEEALNLAPSKNFHLRPRDLISDINV |
| | IVLELKGSETTEMCEYADETATIVEFINRWITFSQSIISTLT |
| 623 | DIQMTQSPSSLSASVGDRVTITCRASQSVSRSLAWYQQKPGKAPKLLIYAASSLQSGVPSRESGSGSG |
| | TDFTLTISSLQPEDFATYYCQQYKSYPVTFGQGTKVEIKRTVAAPSVFIFPPSDEQLKSGTASVVCLL |
| | NNFYPREAKVQWKVDNALQSGNSQESVTEQDSKDSTYSLSSTLTLSKADYEKHKVYACEVTHQGLSSP |
| | VTKSENRGEC |
| 624 | EVQLLESGGGLVKPGGSLRLSCAASGFTEDDYAMHWVRQAPGKGLEWVASITSSSAFIDYAASVKGRF |
| | TISRDDSKNTLYLQMNSLKTEDTAVYYCARERVDWNSYFDLWGRGTLVTVSSASTKGPSVFPLAPSSK |
| | STSGGTAALGCLVKDYFPEPVTVSWNSGALTSGVHTFPAVLQSSGLYSLSSVVTVPSSSLGTQTYICN |
| | VNHKPSNTKVDKKVEPKSCDKTHTCPPCPAPEAAGAPSVELFPPKPKDTLMISRTPEVTCVVVDVSHE |
| | DPEVKFNWYVDGVEVHNAKTKPREEQYNSTYRVVSVLTVLHQDWLNGKEYKCKVSNKALPAPIEKTIS |
| | KAKGQPREPQVYTLPPSREEMTKNQVSLTCLVKGFYPSDIAVEWESNGQPENNYKTTPPVLDSDGSFF |
| | LYSKLTVDKSRWQQGNVFSCSVMHEALHNHYTQKSLSLSPGGGGGSAPTSSSTKKTQLQLEHLLLDLQ |
| | MILNGINNYKNPKLTRMLTFKFYMPKKATELKHLQCLEEELKPLEEALNLAPSKNFHLRPRDLISDIN |
| | VIVLELKGSETTEMCEYADETATIVEFINRWITFSQSIISTLT |
| 625 | EIVMTQSPATLSVSPGERATLSCRASQGISNSYLAWYQQKPGQAPRLLIYGASTRATGIPARESGSGS |
| | GTEFTLTISSLQSEDFAVYYCQQYYTYPPTFGPGTKVDIKRTVAAPSVFIFPPSDEQLKSGTASVVCL |
| | LNNFYPREAKVQWKVDNALQSGNSQESVTEQDSKDSTYSLSSTLTLSKADYEKHKVYACEVTHQGLSS |
| | PVTKSENRGEC |

[0351] In some embodiments, the polypeptide comprises one peptide of SEQ ID NO: 620, 622, or 624 and a second peptide of SEQ ID NO: 621, 623, or 625. In some embodiments, a polypeptide is provided comprising a first peptide of SEQ ID NO: 620 and a second peptide comprising a sequence of SEQ ID NO: 621. In some embodiments, a polypeptide is provided comprising a first peptide of SEQ ID NO: 620 and a second peptide comprising a sequence of SEQ ID NO: 623. In some embodiments, a polypeptide is provided comprising a first peptide of SEQ ID NO: 620 and a second peptide comprising a sequence of SEQ ID NO: 625. In some embodiments, a polypeptide is provided comprising a first peptide of SEQ ID NO: 622 and a second peptide comprising a sequence of SEQ ID NO: 621. In some embodiments, a polypeptide is provided comprising a first peptide of SEQ ID NO: 622 and a second peptide comprising a sequence of SEQ ID NO: 623. In some embodiments, a polypeptide is provided comprising a first peptide of SEQ ID NO: 622 and a second peptide comprising a sequence of SEQ ID NO: 625. In some embodiments, a polypeptide is provided comprising a first peptide of SEQ ID NO: 624 and a second peptide comprising a sequence of SEQ ID NO: 621. In some embodiments, a polypeptide is provided comprising a first peptide of SEQ ID NO: 624 and a second peptide comprising a sequence of SEQ ID NO: 623. In some embodiments, a polypeptide is provided comprising a first peptide of SEQ ID NO: 624 and a second peptide comprising a sequence of SEQ ID NO: 625.

[0352] In some embodiments, the therapeutic counpound comprises a MAdCAM IgG wherein the IL-2 mutein is fused to the C-terminus of the IgG heavy chain, and is selected from one or more of the following sequences:

TABLE 10

| | | IgG1 | Fc-IL- | | | |
|---|---|---|---|---|---|---|
| | | Constant | 2M | | | |
| | VH | Domains | Linker | IL-2M | VK | CK |
| Ab | Seq | Seq | Seq | Seq | Seq | Seq |
| MIAB | EVQLLESG | ASTKGPSVFPLAPSSKSTSG | GGGGS | APTSSSTKKT | DIQMTQS | RTVAAPS |
| 128 | GGLVQPGG | GTAALGCLVKDYFPEPVTVS | (SEQ | QLQLEHLLLD | PSSLSAS | VFIFPPS |
| | SLRLSCAA | WNSGALTSGVHTFPAVLQSS | ID NO: | LQMILNGINN | VGDRVTI | DEQLKSG |
| | SGFTESDE | GLYSLSSVVTVPSSSLGTQT | 23) | YKNPKLTRML | TCRASQS | TASVVCL |
| | WMHWVRQA | YICNVNHKPSNTKVDKKVEP | | TFKFYMPKKA | VSRSLAW | LNNFYPR |
| | PGKGLEWI | KSCDKTHTCPPCPAPEAAGA | | TELKHLQCLE | YQQKPGK | EAKVQWK |
| | SYISGDSG | PSVFLFPPKPKDTLMISRTP | | EELKPLEEAL | APKLLIY | VDNALQS |
| | YTNYADSV | EVTCVVVDVSHEDPEVKENW | | NLAPSKNFHL | AASSLQS | GNSQESV |
| | KGRFTISR | YVDGVEVHNAKTKPREEQYN | | RPRDLISDIN | GVPSRES | TEQDSKD |
| | DNSKNTLY | STYRVVSVLTVLHQDWLNGK | | VIVLELKGSE | GSGSGTD | STYSLSS |
| | LQMNSLRA | EYKCKVSNKALPAPIEKTIS | | TTFMCEYADE | FTLTISS | TLTLSKA |
| | EDTAVYYC | KAKGQPREPQVYTLPPSREE | | TATIVEFINR | LQPEDFA | DYEKHKV |
| | ARDRPNYY | MTKNQVSLTCLVKGFYPSDI | | WITFSQSIIS | TYYCQQY | YACEVTH |
| | YMDVWGKG | AVEWESNGQPENNYKTTPPV | | TLT (SEQ | KSYPVTF | QGLSSPV |
| | TTVTVSS | LDSDGSFFLYSKLTVDKSRW | | ID NO: 41) | GQGTKVE | TKSFNRG |
| | (SEQ ID | QQGNVFSCSVMHEALHNHYT | | | IK (SEQ | EC (SEQ |
| | NO: | QKSLSLSPG (SEQ ID | | | ID NO: | ID NO: |
| | 1346) | NO: 44) | | | 592) | 45) |
| MIAB | EVQLLESG | ASTKGPSVFPLAPSSKSTSG | GGGGS | APTSSSTKKI | DIQMTQS | RTVAAPS |
| 128A | GGLVQPGG | GTAALGCLVKDYFPEPVTVS | (SEQ | QLQLEHLLLD | PSSLSAS | VFIFPPS |
| | SLRLSCAA | WNSGALTSGVHTFPAVLQSS | ID NO: | LQMILNGINN | VGDRVTI | DEQLKSG |
| | SGFTESDE | GLYSLSSVVTVPSSSLGTQT | 23) | YKNPKLTRML | TCRASQS | TASVVCL |
| | WMHWVRQA | YICNVNHKPSNTKVDKKVEP | | TFKFYMPKKA | VSRSLAW | LNNFYPR |
| | PGKGLEWI | KSCDKTHTCPPCPAPEAAGA | | TELKHLQCLE | YQQKPGK | EAKVQWK |
| | SYISGDSG | PSVFLFPPKPKDTLMISRTP | | EELKPLEEAL | APKLLIY | VDNALQS |
| | YTNYADSV | EVTCVVVDVSHEDPEVKENW | | NLAPSKNFHL | AASSLQS | GNSQESV |
| | KGRFTISR | YVDGVEVHNAKTKPREEQYN | | RPRDLISDIN | GVPSRES | TEQDSKD |
| | DNSKNTLY | STYRVVSVLTVLHQDWLNGK | | VIVLELKGSE | GSGSGTD | STYSLSS |
| | LQMNSLRA | EYKCKVSNKALPAPIEKTIS | | TTEMCEYADE | FTLTISS | TLTLSKA |
| | EDTAVYYC | KAKGQPREPQVYTLPPSREE | | TATIVEFINR | LQPEDFA | DYEKHKV |
| | ARDRPQYY | MTKNQVSLTCLVKGFYPSDI | | WITFSQSIIS | TYYCQQY | YACEVTH |
| | YMDVWGKG | AVEWESNGQPENNYKTTPPV | | TLT (SEQ | KSYPVTF | QGLSSPV |
| | TTVTVSS | LDSDGSFFLYSKLTVDKSRW | | ID NO: 41) | GQGTKVE | TKSENRG |
| | (SEQ ID | QQGNVFSCSVMHEALHNHYT | | | IK (SEQ | EC (SEQ |
| | NO: | QKSLSLSPG (SEQ ID | | | ID NO: | ID NO: |
| | 1348) | NO: 44) | | | 592) | 45) |
| MIAB | EVQLLESG | ASTKGPSVFPLAPSSKSTSG | GGGGS | APTSSSTKKT | DIQMTQS | RTVAAPS |
| 129 | GGLVQPGG | GTAALGCLVKDYFPEPVTVS | (SEQ | QLQLEHLLLD | PSSLSAS | VFIFPPS |
| | SLRLSCAA | WNSGALTSGVHTFPAVLQSS | ID NO: | LQMILNGINN | VGDRVTI | DEQLKSG |
| | SGFTESDE | GLYSLSSVVTVPSSSLGTQT | 23) | YKNPKLTRML | TCRASQS | TASVVCL |
| | WMHWVRQA | YICNVNHKPSNTKVDKKVEP | | TFKFYMPKKA | VSRSLAW | LNNFYPR |
| | PGKGLEWI | KSCDKTHTCPPCPAPEAAGA | | TELKHLQCLE | YQQKPGK | EAKVQWK |
| | SYISGDSG | PSVELFPPKPKDTLMISRTP | | EELKPLEEAL | APKLLIY | VDNALQS |
| | YTNYADSV | EVTCVVVDVSHEDPEVKENW | | NLAPSKNFHL | AASSLQS | GNSQESV |
| | KGRFTISR | YVDGVEVHNAKTKPREEQYN | | RPRDLISDIN | GVPSRES | TEQDSKD |
| | DNSKNTLY | STYRVVSVLTVLHQDWLNGK | | VIVLELKGSE | GSGSGTD | STYSLSS |
| | LQMNSLRA | EYKCKVSNKALPAPIEKTIS | | TTFMCEYADE | FTLTISS | TLTLSKA |
| | EDTAVYYC | KAKGQPREPQVYTLPPSREE | | TATIVEFINR | LQPEDFA | DYEKHKV |
| | ARDRPGYY | MTKNQVSLTCLVKGFYPSDI | | WITESQSIIS | TYYCQQY | YACEVTH |
| | YMDVWGKG | AVEWESNGQPENNYKTTPPV | | TLT (SEQ | KSYPVTF | QGLSSPV |
| | TTVTVSS | LDSDGSFFLYSKLTVDKSRW | | ID NO: 41) | GQGTKVE | TKSENRG |
| | (SEQ ID | QQGNVFSCSVMHEALHNHYT | | | IK (SEQ | EC (SEQ |
| | NO: | QKSLSLSPG (SEQ ID | | | ID NO: | ID NO: |
| | 1349) | NO: 44) | | | 592) | 45) |
| MIAB | EVQLLESG | ASTKGPSVFPLAPSSKSTSG | GGGGS | APTSSSTKKT | DIQMTQS | RTVAAPS |
| 130 | GGLVQPGG | GTAALGCLVKDYFPEPVTVS | (SEQ | QLQLEHLLLD | PSSLSAS | VFIFPPS |
| | SLRLSCAA | WNSGALTSGVHTFPAVLQSS | ID NO: | LQMILNGINN | VGDRVTI | DEQLKSG |
| | SGFTESDE | GLYSLSSVVTVPSSSLGTQT | 23) | YKNPKLTRML | TCRASQS | TASVVCL |
| | WMHWVRQA | YICNVNHKPSNTKVDKKVEP | | TFKFYMPKKA | VSRSLAW | LNNFYPR |
| | PGKGLEWI | KSCDKTHTCPPCPAPEAAGA | | TELKHLQCLE | YQQKPGK | EAKVQWK |
| | SYISGDSG | PSVFLFPPKPKDTLMISRTP | | EELKPLEEAL | APKLLIY | VDNALQS |
| | YTNYADSV | EVTCVVVDVSHEDPEVKENW | | NLAPSKNFHL | AASSLQS | GNSQESV |
| | KGRFTISR | YVDGVEVHNAKTKPREEQYN | | RPRDLISDIN | GVPSRES | TEQDSKD |
| | DNSKNTLY | STYRVVSVLTVLHQDWLNGK | | VIVLELKGSE | GSGSGTD | STYSLSS |
| | LQMNSLRA | EYKCKVSNKALPAPIEKTIS | | TTFMCEYADE | FTLTISS | TLTLSKA |
| | EDTAVYYC | KAKGQPREPQVYTLPPSREE | | TATIVEFINR | LQPEDFA | DYEKHKV |
| | ARDRPYYY | MTKNQVSLTCLVKGFYPSDI | | WITFSQSIIS | TYYCQQY | YACEVTH |
| | QMDVWGKG | AVEWESNGQPENNYKTTPPV | | TLT (SEQ | KSYPVTF | QGLSSPV |
| | TTVTVSS | LDSDGSFFLYSKLTVDKSRW | | ID NO: 41) | GQGTKVE | TKSENRG |
| | (SEQ ID | QQGNVFSCSVMHEALHNHYT | | | IK (SEQ | EC (SEQ |
| | NO: | QKSLSLSPG (SEQ ID | | | ID NO: | ID NO: |
| | 1350) | NO: 44) | | | 592) | 45) |
| MIAB | EVQLLESG | ASTKGPSVFPLAPSSKSTSG | GGGGS | APTSSSTKKT | DIQMTQS | RTVAAPS |
| 131 | GGLVQPGG | GTAALGCLVKDYFPEPVTVS | (SEQ | QLQLEHLLLD | PSSLSAS | VFIFPPS |
| | SLRLSCAA | WNSGALTSGVHTFPAVLQSS | ID NO: | LQMILNGINN | VGDRVTI | DEQLKSG |
| | SGFTESDE | GLYSLSSVVTVPSSSLGTQT | 23) | YKNPKLTRML | TCRASQS | TASVVCL |
| | WMHWVRQA | YICNVNHKPSNTKVDKKVEP | | TFKFYMPKKA | VSRSLAW | LNNFYPR |
| | PGKGLEWI | KSCDKTHTCPPCPAPEAAGA | | TELKHLQCLE | YQQKPGK | EAKVQWK |
| | SYISGDSG | PSVFLFPPKPKDTLMISRTP | | EELKPLEEAL | APKLLIY | VDNALQS |
| | YTNYADSV | EVTCVVVDVSHEDPEVKENW | | NLAPSKNFHL | AASSLQS | GNSQESV |
| | KGRFTISR | YVDGVEVHNAKTKPREEQYN | | RPRDLISDIN | GVPSRES | TEQDSKD |
| | DNSKNTLY | STYRVVSVLTVLHQDWLNGK | | VIVLELKGSE | GSGSGTD | STYSLSS |
| | LQMNSLRA | EYKCKVSNKALPAPIEKTIS | | TTFMCEYADE | FTLTISS | TLTLSKA |
| | EDTAVYYC | KAKGQPREPQVYTLPPSREE | | TATIVEFINE | LQPEDFA | DYEKHKV |
| | ARDRPYYY | MTKNQVSLTCLVKGFYPSDI | | WITFSQSIIS | TYYCQQY | YACEVTH |
| | GMDVWGKG | AVEWESNGQPENNYKTTPPV | | TLT (SEQ | KSYPVTF | QGLSSPV |
| | TTVTVSS | LDSDGSFFLYSKLTVDKSRW | | ID NO: 41) | GQGTKVE | TKSFNRG |
| | (SEQ ID | QQGNVFSCSVMHEALHNHYT | | | IK (SEQ | EC (SEQ |
| | NO: | QKSLSLSPG (SEQ ID | | | ID NO: | ID NO: |
| | 1351) | NO: 44) | | | 592) | 45) |
| MIAB | EVQLLESG | ASTKGPSVFPLAPSSKSTSG | GGGGS | APTSSSTKKT | DIQMTQS | RTVAAPS |
| 132 | GGLVQPGG | GTAALGCLVKDYFPEPVTVS | (SEQ | QLQLEHLLLD | PSSLSAS | VFIFPPS |
| | SLRLSCAA | WNSGALTSGVHTFPAVLQSS | ID NO: | LQMILNGINN | VGDRVTI | DEQLKSG |
| | SGFTFSNF | GLYSLSSVVTVPSSSLGTQT | 23) | YKNPKLTRML | TCRASQS | TASVVCL |
| | WMHWVRQA | YICNVNHKPSNTKVDKKVEP | | TFKFYMPKKA | VSRSLAW | LNNFYPR |
| | PGKGLEWI | KSCDKTHTCPPCPAPEAAGA | | TELKHLQCLE | YQQKPGK | EAKVQWK |
| | SYISGDSG | PSVFLFPPKPKDTLMISRTP | | EELKPLEEAL | APKLLIY | VDNALQS |
| | YTNYADSV | EVTCVVVDVSHEDPEVKENW | | NLAPSKNEHL | AASSLQS | GNSQESV |
| | KGRFTISR | YVDGVEVHNAKTKPREEQYN | | RPRDLISDIN | GVPSRFS | TEQDSKD |
| | DNSKNTLY | STYRVVSVLTVLHQDWLNGK | | VIVLELKGSE | GSGSGTD | STYSLSS |
| | LQMNSLRA | EYKCKVSNKALPAPIEKTIS | | TTEMCEYADE | FTLTISS | TLTLSKA |
| | EDTAVYYC | KAKGQPREPQVYTLPPSREE | | TATIVEFINR | LQPEDFA | DYEKHKV |
| | ARDRPYYY | MTKNQVSLTCLVKGFYPSDI | | WITESQSIIS | TYYCQQY | YACEVTH |
| | YMDVWGKG | AVEWESNGQPENNYKTTPPV | | TLT (SEQ | KSYPVTF | QGLSSPV |
| | TTVTVSS | LDSDGSFFLYSKLTVDKSRW | | ID NO: 41) | GQGTKVE | TKSENRG |
| | (SEQ ID | QQGNVFSCSVMHEALHNHYT | | | IK (SEQ | EC (SEQ |
| | NO: | QKSLSLSPG (SEQ ID | | | ID NO: | ID NO: |
| | 1352) | NO: 44) | | | 592) | 45) |
| MIAB | EVQLLESG | ASTKGPSVFPLAPSSKSTSG | GGGGS | APTSSSTKKT | DIQMTQS | RTVAAPS |
| 133 | GGLVQPGG | GTAALGCLVKDYFPEPVTVS | (SEQ | QLQLEHLLLD | PSSLSAS | VFIFPPS |
| | SLRLSCAA | WNSGALTSGVHTFPAVLQSS | ID NO: | LQMILNGINN | VGDRVTI | DEQLKSG |
| | SGFTFSSF | GLYSLSSVVTVPSSSLGTQT | 23) | YKNPKLTRML | TCRASQS | TASVVCL |
| | WMHWVRQA | YICNVNHKPSNTKVDKKVEP | | TFKFYMPKKA | VSRSLAW | LNNFYPR |
| | PGKGLEWI | KSCDKTHTCPPCPAPEAAGA | | TELKHLQCLE | YQQKPGK | EAKVQWK |
| | SYISGDSG | PSVFLFPPKPKDTLMISRTP | | EELKPLEEAL | APKLLIY | VDNALQS |
| | YTNYADSV | EVTCVVVDVSHEDPEVKENW | | NLAPSKNEHL | AASSLQS | GNSQESV |
| | KGRFTISR | YVDGVEVHNAKTKPREEQYN | | RPRDLISDIN | GVPSRES | TEQDSKD |
| | DNSKNTLY | STYRVVSVLTVLHQDWLNGK | | VIVLELKGSE | GSGSGTD | STYSLSS |
| | LQMNSLRA | EYKCKVSNKALPAPIEKTIS | | TTFMCEYADE | FTLTISS | TLTLSKA |
| | EDTAVYYC | KAKGQPREPQVYTLPPSREE | | TATIVEFINR | LQPEDFA | DYEKHKV |
| | ARDRPYYY | MTKNQVSLTCLVKGFYPSDI | | WITFSQSIIS | TYYCQQY | YACEVTH |
| | YMDVWGKG | AVEWESNGQPENNYKTTPPV | | TLT (SEQ | KSYPVTF | QGLSSPV |
| | TTVTVSS | LDSDGSFFLYSKLTVDKSRW | | ID NO: 41) | GQGTKVE | TKSENRG |
| | (SEQ ID | QQGNVFSCSVMHEALHNHYT | | | IK (SEQ | EC (SEQ |
| | NO: | QKSLSLSPG (SEQ ID | | | ID NO: | ID NO: |
| | 1353) | NO: 44) | | | 592) | 45) |
| MIAB | EVQLLESG | ASTKGPSVFPLAPSSKSTSG | GGGGS | APTSSSTKKT | DIQMTQS | RTVAAPS |
| 134 | GGLVQPGG | GTAALGCLVKDYFPEPVTVS | (SEQ | QLQLEHLLLD | PSSLSAS | VFIFPPS |
| | SLRLSCAA | WNSGALTSGVHTFPAVLQSS | ID NO: | LQMILNGINN | VGDRVTI | DEQLKSG |
| | SGFTFSAF | GLYSLSSVVTVPSSSLGTQT | 23) | YKNPKLTRML | TCRASQS | TASVVCL |
| | WMHWVRQA | YICNVNHKPSNTKVDKKVEP | | TFKFYMPKKA | VSRSLAW | LNNFYPR |
| | PGKGLEWI | KSCDKTHTCPPCPAPEAAGA | | TELKHLQCLE | YQQKPGK | EAKVQWK |
| | SYISGDSG | PSVFLFPPKPKDTLMISRTP | | EELKPLEEAL | APKLLIY | VDNALQS |
| | YTNYADSV | EVTCVVVDVSHEDPEVKENW | | NLAPSKNFHL | AASSLQS | GNSQESV |
| | KGRFTISR | YVDGVEVHNAKTKPREEQYN | | RPRDLISDIN | GVPSRES | TEQDSKD |
| | DNSKNTLY | STYRVVSVLTVLHQDWLNGK | | VIVLELKGSE | GSGSGTD | STYSLSS |
| | LQMNSLRA | EYKCKVSNKALPAPIEKTIS | | TTFMCEYADE | FTLTISS | TLTLSKA |
| | EDTAVYYC | KAKGQPREPQVYTLPPSREE | | TATIVEFINR | LQPEDFA | DYEKHKV |
| | ARDRPYYY | MTKNQVSLTCLVKGFYPSDI | | WITFSQSIIS | TYYCQQY | YACEVTH |
| | YMDVWGKG | AVEWESNGQPENNYKTTPPV | | TLT (SEQ | KSYPVTF | QGLSSPV |
| | TTVTVSS | LDSDGSFFLYSKLTVDKSRW | | ID NO: 41) | GQGTKVE | TKSFNRG |
| | (SEQ ID | QQGNVFSCSVMHEALHNHYT | | | IK (SEQ | EC (SEQ |
| | NO: | QKSLSLSPG (SEQ ID | | | ID NO: | ID NO: |
| | 1354) | NO: 44) | | | 592) | 45) |
| MIAB | EVQLLESG | ASTKGPSVFPLAPSSKSTSG | GGGGS | APTSSSTKKT | DIQMTQS | RTVAAPS |
| 135 | GGLVQPGG | GTAALGCLVKDYFPEPVTVS | (SEQ | QLQLEHLLLD | PSSLSAS | VFIFPPS |
| | SLRLSCAA | WNSGALTSGVHTFPAVLQSS | ID NO: | LQMILNGINN | VGDRVTI | DEQLKSG |
| | SGFTESDE | GLYSLSSVVTVPSSSLGTQT | 23) | YKNPKLTRML | TCRASQS | TASVVCL |
| | WMHWVRQA | YICNVNHKPSNTKVDKKVEP | | TFKFYMPKKA | VSRSLAW | LNNFYPR |
| | PGKGLEWI | KSCDKTHTCPPCPAPEAAGA | | TELKHLQCLE | YQQKPGK | EAKVQWK |
| | SYISGDSG | PSVELFPPKPKDTLMISRTP | | EELKPLEEAL | APKLLIY | VDNALQS |
| | YTNYADSV | EVTCVVVDVSHEDPEVKENW | | NLAPSKNFHL | AASSLQS | GNSQESV |
| | KGRFTISR | YVDGVEVHNAKTKPREEQYN | | RPRDLISDIN | GVPSRFS | TEQDSKD |
| | DNSNNTLY | STYRVVSVLTVLHQDWLNGK | | VIVLELKGSE | GSGSGTD | STYSLSS |
| | LQMNSLRA | EYKCKVSNKALPAPIEKTIS | | TTFMCEYADE | FTLTISS | TLTLSKA |
| | EDTAVYYC | KAKGQPREPQVYTLPPSREE | | TATIVEFINR | LQPEDFA | DYEKHKV |
| | ARDRPYYY | MTKNQVSLTCLVKGFYPSDI | | WITFSQSIIS | TYYCQQY | YACEVTH |
| | YMDVWGKG | AVEWESNGQPENNYKTTPPV | | TLT (SEQ | KSYPVTF | QGLSSPV |
| | TTVTVSS | LDSDGSFFLYSKLTVDKSRW | | ID NO: 41) | GQGTKVE | TKSFNRG |
| | (SEQ ID | QQGNVFSCSVMHEALHNHYT | | | IK (SEQ | EC (SEQ |
| | NO: | QKSLSLSPG (SEQ ID | | | ID NO: | ID NO: |
| | 1355) | NO: 44) | | | 592) | 45) |
| MIAB | EVQLLESG | ASTKGPSVFPLAPSSKSTSG | GGGGS | APTSSSTKKT | DIQMTQS | RTVAAPS |
| 136 | GGLVQPGG | GTAALGCLVKDYFPEPVTVS | (SEQ | QLQLEHLLLD | PSSLSAS | VFIFPPS |
| | SLRLSCAA | WNSGALTSGVHTFPAVLQSS | ID NO: | LQMILNGINN | VGDRVTI | DEQLKSG |
| | SGFTESSY | GLYSLSSVVTVPSSSLGTQT | 23) | YKNPKLTRML | TCRASQS | TASVVCL |
| | AMSWVRQA | YICNVNHKPSNTKVDKKVEP | | TFKFYMPKKA | VSRSLAW | LNNFYPR |
| | PGKGLEWI | KSCDKTHTCPPCPAPEAAGA | | TELKHLQCLE | YQQKPGK | EAKVQWK |
| | SYISGDSG | PSVFLFPPKPKDTLMISRTP | | EELKPLEEAL | APKLLIY | VDNALQS |
| | YTNYADSV | EVTCVVVDVSHEDPEVKENW | | NLAPSKNFHL | AASSLQS | GNSQESV |
| | KGRFTISR | YVDGVEVHNAKTKPREEQYN | | RPRDLISDIN | GVPSRFS | TEQDSKD |
| | DNSKNTLY | STYRVVSVLTVLHQDWLNGK | | VIVLELKGSE | GSGSGTD | STYSLSS |
| | LQMNSLRA | EYKCKVSNKALPAPIEKTIS | | TTEMCEYADE | FTLTISS | TLTLSKA |
| | EDTAVYYC | KAKGQPREPQVYTLPPSREE | | TATIVEFINR | LQPEDFA | DYEKHKV |
| | ARDRPYYY | MTKNQVSLTCLVKGFYPSDI | | WITESQSIIS | TYYCQQY | YACEVTH |
| | YMDVWGKG | AVEWESNGQPENNYKTTPPV | | TLT (SEQ | KSYPVTF | QGLSSPV |
| | TTVTVSS | LDSDGSFFLYSKLTVDKSRW | | ID NO: 41) | GQGTKVE | TKSENRG |
| | (SEQ ID | QQGNVFSCSVMHEALHNHYT | | | IK (SEQ | EC (SEQ |
| | NO: | QKSLSLSPG (SEQ ID | | | ID NO: | ID NO: |
| | 1356) | NO: 44) | | | 592) | 45) |
| MIAB | EVQLLESG | ASTKGPSVFPLAPSSKSTSG | GGGGS | APTSSSTKKT | DIQMTQS | RTVAAPS |
| 137 | GGLVQPGG | GTAALGCLVKDYFPEPVTVS | (SEQ | QLQLEHLLLD | PSSLSAS | VFIFPPS |
| | SLRLSCAA | WNSGALTSGVHTFPAVLQSS | ID NO: | LQMILNGINN | VGDRVTI | DEQLKSG |
| | SGFTESDE | GLYSLSSVVTVPSSSLGTQT | 23) | YKNPKLTRML | TCRASQS | TASVVCL |
| | WMHWVRQA | YICNVNHKPSNTKVDKKVEP | | TFKFYMPKKA | VSRSLAW | LNNFYPR |
| | PGKGLEWV | KSCDKTHTCPPCPAPEAAGA | | TELKHLQCLE | YQQKPGK | EAKVQWK |
| | SAISGSGG | PSVFLFPPKPKDTLMISRTP | | EELKPLEEAL | APKLLIY | VDNALQS |
| | STYYADSV | EVTCVVVDVSHEDPEVKENW | | NLAPSKNEHL | AASSLQS | GNSQESV |
| | KGRFTISR | YVDGVEVHNAKTKPREEQYN | | RPRDLISDIN | GVPSRFS | TEQDSKD |
| | DNSKNTLY | STYRVVSVLTVLHQDWLNGK | | VIVLELKGSE | GSGSGTD | STYSLSS |
| | LQMNSLRA | EYKCKVSNKALPAPIEKTIS | | TTEMCEYADE | FTLTISS | TLTLSKA |
| | EDTAVYYC | KAKGQPREPQVYTLPPSREE | | TATIVEFINR | LQPEDFA | DYEKHKV |
| | ARDRPYYY | MTKNQVSLTCLVKGFYPSDI | | WITFSQSIIS | TYYCQQY | YACEVTH |
| | YMDVWGKG | AVEWESNGQPENNYKTTPPV | | TLT (SEQ | KSYPVTF | QGLSSPV |
| | TTVTVSS | LDSDGSFFLYSKLTVDKSRW | | ID NO: 41) | GQGTKVE | TKSFNRG |
| | (SEQ ID | QQGNVFSCSVMHEALHNHYT | | | IK (SEQ | EC (SEQ |
| | NO: | QKSLSLSPG (SEQ ID | | | ID NO: | ID NO: |
| | 1357) | NO: 44) | | | 592) | 45) |
| MIAB | EVQLLESG | ASTKGPSVFPLAPSSKSTSG | GGGGS | APTSSSTKKT | DIQMTQS | RTVAAPS |
| 138 | GGLVQPGG | GTAALGCLVKDYFPEPVTVS | (SEQ | QLQLEHLLLD | PSSLSAS | VFIFPPS |
| | SLRLSCAA | WNSGALTSGVHTFPAVLQSS | ID NO: | LQMILNGINN | VGDRVTI | DEQLKSG |
| | SGFTESSY | GLYSLSSVVTVPSSSLGTQT | 23) | YKNPKLTRML | TCRASQS | TASVVCL |
| | AMSWVRQA | YICNVNHKPSNTKVDKKVEP | | TFKFYMPKKA | VSRSLAW | LNNFYPR |
| | PGKGLEWV | KSCDKTHTCPPCPAPEAAGA | | TELKHLQCLE | YQQKPGK | EAKVQWK |
| | SAISGSGG | PSVFLFPPKPKDTLMISRTP | | EELKPLEEAL | APKLLIY | VDNALQS |
| | STYYADSV | EVTCVVVDVSHEDPEVKENW | | NLAPSKNFHL | AASSLQS | GNSQESV |
| | KGRFTISR | YVDGVEVHNAKTKPREEQYN | | RPRDLISDIN | GVPSRES | TEQDSKD |
| | DNSKNTLY | STYRVVSVLTVLHQDWLNGK | | VIVLELKGSE | GSGSGTD | STYSLSS |
| | LQMNSLRA | EYKCKVSNKALPAPIEKTIS | | TTFMCEYADE | FTLTISS | TLTLSKA |
| | EDTAVYYC | KAKGQPREPQVYTLPPSREE | | TATIVEFINR | LQPEDFA | DYEKHKV |
| | ARDRPYYY | MTKNQVSLTCLVKGFYPSDI | | WITFSQSIIS | TYYCQQY | YACEVTH |
| | YMDVWGKG | AVEWESNGQPENNYKTTPPV | | TLT (SEQ | KSYPVTF | QGLSSPV |
| | TTVTVSS | LDSDGSFFLYSKLTVDKSRW | | ID NO: 41) | GQGTKVE | TKSENRG |
| | (SEQ ID | QQGNVFSCSVMHEALHNHYT | | | IK (SEQ | EC (SEQ |
| | NO: | QKSLSLSPG (SEQ ID | | | ID NO: | ID NO: |
| | 1358) | NO: 44) | | | 592) | 45) |
| MIAB | EVQLLESG | ASTKGPSVFPLAPSSKSTSG | GGGGS | APTSSSTKKT | DIQMTQS | RTVAAPS |
| 139 | GGLVQPGG | GTAALGCLVKDYFPEPVTVS | (SEQ | QLQLEHLLLD | PSSLSAS | VFIFPPS |
| | SLRLSCAA | WNSGALTSGVHTEPAVLQSS | ID NO: | LQMILNGINN | VGDRVTI | DEQLKSG |
| | SGFTESDE | GLYSLSSVVTVPSSSLGTQT | 23) | YKNPKLTRML | TCRASQS | TASVVCL |
| | WMHWVRQA | YICNVNHKPSNTKVDKKVEP | | TFKFYMPKKA | ISSYLNW | LNNFYPR |
| | PGKGLEWI | KSCDKTHTCPPCPAPEAAGA | | TELKHLQCLE | YQQKPGK | EAKVQWK |
| | SYISGDSG | PSVELFPPKPKDTLMISRTP | | EELKPLEEAL | APKLLIY | VDNALQS |
| | YTNYADSV | EVTCVVVDVSHEDPEVKENW | | NLAPSKNFHL | AASSLQS | GNSQESV |
| | KGRFTISR | YVDGVEVHNAKTKPREEQYN | | RPRDLISDIN | GVPSRES | TEQDSKD |
| | DNSKNTLY | STYRVVSVLTVLHQDWLNGK | | VIVLELKGSE | GSGSGTD | STYSLSS |
| | LQMNSLRA | EYKCKVSNKALPAPIEKTIS | | TTFMCEYADE | FTLTISS | TLTLSKA |
| | EDTAVYYC | KAKGQPREPQVYTLPPSREE | | TATIVEFINR | LQPEDFA | DYEKHKV |
| | ARDRPYYY | MTKNQVSLTCLVKGFYPSDI | | WITESQSIIS | TYYCQQS | YACEVTH |
| | YMDVWGKG | AVEWESNGQPENNYKTTPPV | | TLT (SEQ | YSTPRTF | QGLSSPV |
| | TTVTVSS | LDSDGSFFLYSKLTVDKSRW | | ID NO: 41) | GQGTKVE | TKSFNRG |
| | (SEQ ID | QQGNVFSCSVMHEALHNHYT | | | IK (SEQ | EC (SEQ |
| | NO: 591) | QKSLSLSPG (SEQ ID | | | ID NO: | ID NO: |
| | | NO: 44) | | | 1360) | 45) |
| MIAB | EVQLLESG | ASTKGPSVFPLAPSSKSTSG | GGGGS | APTSSSTKKT | DIQMTQS | RTVAAPS |
| 140 | GGLVQPGG | GTAALGCLVKDYFPEPVTVS | (SEQ | QLQLEHLLLD | PSSLSAS | VFIFPPS |
| | SLRLSCAA | WNSGALTSGVHTFPAVLQSS | ID NO: | LQMILNGINN | VGDRVTI | DEQLKSG |
| | SGFTESSY | GLYSLSSVVTVPSSSLGTQT | 23) | YKNPKLTRML | TCRASQS | TASVVCL |
| | AMSWVRQA | YICNVNHKPSNTKVDKKVEP | | TFKFYMPKKA | ISSYLNW | LNNFYPR |
| | PGKGLEWV | KSCDKTHTCPPCPAPEAAGA | | TELKHLQCLE | YQQKPGK | EAKVQWK |
| | SAISGSGG | PSVFLFPPKPKDTLMISRTP | | EELKPLEEAL | APKLLIY | VDNALQS |
| | STYYADSV | EVTCVVVDVSHEDPEVKENW | | NLAPSKNFHL | AASSLQS | GNSQESV |
| | KGRFTISR | YVDGVEVHNAKTKPREEQYN | | RPRDLISDIN | GVPSRES | TEQDSKD |
| | DNSKNTLY | STYRVVSVLTVLHQDWLNGK | | VIVLELKGSE | GSGSGTD | STYSLSS |
| | LQMNSLRA | EYKCKVSNKALPAPIEKTIS | | TTEMCEYADE | FTLTISS | TLTLSKA |
| | EDTAVYYC | KAKGQPREPQVYTLPPSREE | | TATIVEFINR | LQPEDFA | DYEKHKV |
| | ARDRPYYY | MTKNQVSLTCLVKGFYPSDI | | WITFSQSIIS | TYYCQQS | YACEVTH |
| | YMDVWGKG | AVEWESNGQPENNYKTTPPV | | TLT (SEQ | YSTPRTF | QGLSSPV |
| | TTVTVSS | LDSDGSFFLYSKLTVDKSRW | | ID NO: 41) | GQGTKVE | TKSENRG |
| | (SEQ ID | QQGNVFSCSVMHEALHNHYT | | | IK (SEQ | EC (SEQ |
| | NO: | QKSLSLSPG (SEQ ID | | | ID NO: | ID NO: |
| | 1358) | NO: 44) | | | 1360) | 45) |
| MIAB | EVQLLESG | ASTKGPSVFPLAPSSKSTSG | GGGGS | APTSSSTKKT | DIQMTQS | RTVAAPS |
| 141 | GGLVQPGG | GTAALGCLVKDYFPEPVTVS | SEQ | QLQLEHLLLD | PSSLSAS | VFIFPPS |
| | SLRLSCAA | WNSGALTSGVHTFPAVLQSS | ID NO: | LQMILNGINN | VGDRVTI | DEQLKSG |
| | SGFTESDE | GLYSLSSVVTVPSSSLGTQT | 23) | YKNPKLTRML | TCRASQS | TASVVCL |
| | WMHWVRQA | YICNVNHKPSNTKVDKKVEP | | TFKFYMPKKA | ISSYLNW | LNNFYPR |
| | PGKGLEWI | KSCDKTHTCPPCPAPEAAGA | | TELKHLQCLE | YQQKPGK | EAKVQWK |
| | SYISGDSG | PSVFLFPPKPKDTLMISRTP | | EELKPLEEAL | APKLLIY | VDNALQS |
| | YTNYADSV | EVTCVVVDVSHEDPEVKENW | | NLAPSKNFHL | AASSLQS | GNSQESV |
| | KGRFTISR | YVDGVEVHNAKTKPREEQYN | | RPRDLISDIN | GVPSRES | TEQDSKD |
| | DNSKNTLY | STYRVVSVLTVLHQDWLNGK | | VIVLELKGSE | GSGSGTD | STYSLSS |
| | LQMNSLRA | EYKCKVSNKALPAPIEKTIS | | TTFMCEYADE | FTLTISS | TLTLSKA |
| | EDTAVYYC | KAKGQPREPQVYTLPPSREE | | TATIVEFINR | LQPEDFA | DYEKHKV |
| | ARDRPYYY | MTKNQVSLTCLVKGFYPSDI | | WITESQSIIS | TYYCQQY | YACEVTH |
| | YMDVWGKG | AVEWESNGQPENNYKTTPPV | | TLT (SEQ | KSYPVTF | QGLSSPV |
| | TTVTVSS | LDSDGSFFLYSKLTVDKSRW | | ID NO: 41) | GQGTKVE | TKSENRG |
| | (SEQ ID | QQGNVFSCSVMHEALHNHYT | | | IK (SEQ | EC (SEQ |
| | NO: 591) | QKSLSLSPG (SEQ ID | | | ID NO: | ID NO: |
| | | NO: 44) | | | 1361) | 45) |
| MIAB | EVQLLESG | ASTKGPSVFPLAPSSKSTSG | GGGGS | APTSSSTKKT | DIQMTQS | RTVAAPS |
| 142 | GGLVQPGG | GTAALGCLVKDYFPEPVTVS | (SEQ | QLQLEHLLLD | PSSLSAS | VFIFPPS |
| | SLRLSCAA | WNSGALTSGVHTFPAVLQSS | ID NO: | LQMILNGINN | VGDRVTI | DEQLKSG |
| | SGFTESDE | GLYSLSSVVTVPSSSLGTQT | 23) | YKNPKLTRML | TCRASQS | TASVVCL |
| | WMHWVRQA | YICNVNHKPSNTKVDKKVEP | | TFKFYMPKKA | VSRSLAW | LNNFYPR |
| | PGKGLEWI | KSCDKTHTCPPCPAPEAAGA | | TELKHLQCLE | YQQKPGK | EAKVQWK |
| | SYISGDSG | PSVFLFPPKPKDTLMISRTP | | EELKPLEEAL | APKLLIY | VDNALQS |
| | YTNYADSV | EVTCVVVDVSHEDPEVKENW | | NLAPSKNFHL | AASSLQS | GNSQESV |
| | KGRFTISR | YVDGVEVHNAKTKPREEQYN | | RPRDLISDIN | GVPSRES | TEQDSKD |
| | DNSKNTLY | STYRVVSVLTVLHQDWLNGK | | VIVLELKGSE | GSGSGTD | STYSLSS |
| | LQMNSLRA | EYKCKVSNKALPAPIEKTIS | | TTFMCEYADE | FTLTISS | TLTLSKA |
| | EDTAVYYC | KAKGQPREPQVYTLPPSREE | | TATIVEFINR | LQPEDFA | DYEKHKV |
| | ARDRPYYY | MTKNQVSLTCLVKGFYPSDI | | WITFSQSIIS | TYYCQQS | YACEVTH |
| | YMDVWGKG | AVEWESNGQPENNYKTTPPV | | TLT (SEQ | YSTPRTE | QGLSSPV |
| | TTVTVSS | LDSDGSFFLYSKLTVDKSRW | | ID NO: 41) | GQGTKVE | TKSENRG |
| | (SEQ ID | QQGNVFSCSVMHEALHNHYT | | | IK (SEQ | EC (SEQ |
| | NO: 591) | QKSLSLSPG (SEQ ID | | | ID NO: | ID NO: |
| | | NO: 44) | | | 1362) | 45) |
| MIAB | EVQLLESG | ASTKGPSVFPLAPSSKSTSG | GGGGS | APTSSSTKKT | DIQMTQS | RTVAAPS |
| 143 | GGLVQPGG | GTAALGCLVKDYFPEPVTVS | (SEQ | QLQLEHLLLD | PSSLSAS | VFIFPPS |
| | SLRLSCAA | WNSGALTSGVHTFPAVLQSS | ID NO: | LQMILNGINN | VGDRVTI | DEQLKSG |
| | SGFTESDE | GLYSLSSVVTVPSSSLGTQT | 23) | YKNPKLTRML | TCRASQS | TASVVCL |
| | WMHWVRQA | YICNVNHKPSNTKVDKKVEP | | TFKFYMPKKA | VSRSLAW | LNNFYPR |
| | PGKGLEWI | KSCDKTHTCPPCPAPEAAGA | | TELKHLQCLE | YQQKPGK | EAKVQWK |
| | SYISGDSG | PSVELFPPKPKDTLMISRTP | | EELKPLEEAL | APKLLIY | VDNALQS |
| | YTNYADSV | EVTCVVVDVSHEDPEVKENW | | NLAPSKNFHL | AASSLQS | GNSQESV |
| | KGRFTISR | YVDGVEVHNAKTKPREEQYN | | RPRDLISDIN | GVPSRES | TEQDSKD |
| | DNSKNTLY | STYRVVSVLTVLHQDWLNGK | | VIVLELKGSE | GSGSGTD | STYSLSS |
| | LQMNSLRA | EYKCKVSNKALPAPIEKTIS | | TTFMCEYADE | FTLTISS | TLTLSKA |
| | EDTAVYYC | KAKGQPREPQVYTLPPSREE | | TATIVEFINR | LQPEDFA | DYEKHKV |
| | ARDRPYYY | MTKNQVSLTCLVKGFYPSDI | | WITFSQSIIS | TYYCQQY | YACEVTH |
| | YMDVWGKG | AVEWESNGQPENNYKTTPPV | | TLT (SEQ | KSYPVTF | QGLSSPV |
| | TTVTVSS | LDSDGSFFLYSKLTVDKSRW | | ID NO: 41) | GQGTKVE | TKSENRG |
| | (SEQ ID | QQGNVFSCSVMHEALHNHYT | | | IK (SEQ | EC (SEQ |
| | NO: 591) | QKSLSLSPG (SEQ ID | | | ID NO: | ID NO: |
| | | NO: 44) | | | 592) | 45) |
| MIAB | EVQLLESG | ASTKGPSVFPLAPSSKSTSG | GGGGS | APTSSSTKKT | DIQMTQS | RTVAAPS |
| 144 | GGLVQPGG | GTAALGCLVKDYFPEPVTVS | (SEQ | QLQLEHLLLD | PSSLSAS | VFIFPPS |
| | SLRLSCAA | WNSGALTSGVHTFPAVLQSS | ID NO: | LQMILNGINN | VGDRVTI | DEQLKSG |
| | SGFTESDE | GLYSLSSVVTVPSSSLGTQT | 23) | YKNPKLTRML | TCRASQS | TASVVCL |
| | WMHWVRQA | YICNVNHKPSNTKVDKKVEP | | TFKFYMPKKA | VSRSLAW | LNNFYPR |
| | PGKGLEWI | KSCDKTHTCPPCPAPEAAGA | | TELKHLQCLE | YQQKPGK | EAKVQWK |
| | SYISGDSG | PSVFLFPPKPKDTLMISRTP | | EELKPLEEAL | APKLLIY | VDNALQS |
| | YTNYADSV | EVTCVVVDVSHEDPEVKENW | | NLAPSKNEHL | AASSLQS | GNSQESV |
| | KGRFTISR | YVDGVEVHNAKTKPREEQYN | | RPRDLISDIN | GVPSRES | TEQDSKD |
| | DNSKNTLY | STYRVVSVLTVLHQDWLNGK | | VIVLELKGSE | GSGSGTD | STYSLSS |
| | LQMNSLRA | EYKCKVSNKALPAPIEKTIS | | TTFMCEYADE | FTLTISS | TLTLSKA |
| | EDTAVYYC | KAKGQPREPQVYTLPPSREE | | TATIVEFINR | LQPEDFA | DYEKHKV |
| | ARDRPYYY | MTKNQVSLTCLVKGFYPSDI | | WITFSQSIIS | TYYCQQY | YACEVTH |
| | YMDVWGKG | AVEWESNGQPENNYKTTPPV | | TLT (SEQ | KSYPVTF | QGLSSPV |
| | TTVTVSS | LDSDGSFFLYSKLTVDKSRW | | ID NO: 41) | GQGTKVE | TKSENRG |
| | (SEQ ID | QQGNVFSCSVMHEALHNHYT | | | IK (SEQ | EC (SEQ |
| | NO: 591) | QKSLSLSPG (SEQ ID | | | ID NO: | ID NO: |
| | | NO: 44) | | | 592) | 45) |
| MIAB | EVQLLESG | ASTKGPSVFPLAPSSKSTSG | GGGGS | APTSSSTKKT | DIQMTQS | RTVAAPS |
| 145 | GGLVQPGG | GTAALGCLVKDYFPEPVTVS | (SEQ | QLQLEHLLLD | PSSLSAS | VFIFPPS |
| | SLRLSCAA | WNSGALTSGVHTFPAVLQSS | ID NO: | LQMILNGINN | VGDRVTI | DEQLKSG |
| | SGFTESDE | GLYSLSSVVTVPSSSLGTQT | 23) | YKNPKLTRML | TCRASQS | TASVVCL |
| | WMHWVRQA | YICNVNHKPSNTKVDKKVEP | | TFKFYMPKKA | ISRSLAW | LNNFYPR |
| | PGKGLEWI | KSCDKTHTCPPCPAPEAAGA | | TELKHLQCLE | YQQKPGK | EAKVQWK |
| | SYISGDSG | PSVFLFPPKPKDTLMISRTP | | EELKPLEEAL | APKLLIY | VDNALQS |
| | YTNYADSV | EVTCVVVDVSHEDPEVKENW | | NLAPSKNEHL | AASSLQS | GNSQESV |
| | KGRFTISR | YVDGVEVHNAKTKPREEQYN | | RPRDLISDIN | GVPSRES | TEQDSKD |
| | DNSKNTLY | STYRVVSVLTVLHQDWLNGK | | VIVLELKGSE | GSGSGTD | STYSLSS |
| | LQMNSLRA | EYKCKVSNKALPAPIEKTIS | | TTEMCEYADE | FTLTISS | TLTLSKA |
| | EDTAVYYC | KAKGQPREPQVYTLPPSREE | | TATIVEFINR | LQPEDFA | DYEKHKV |
| | ARDRPYYY | MTKNQVSLTCLVKGFYPSDI | | WITFSQSIIS | TYYCQQY | YACEVTH |
| | YMDVWGKG | AVEWESNGQPENNYKTTPPV | | TLT (SEQ | KSYPVTF | QGLSSPV |
| | TTVTVSS | LDSDGSFFLYSKLTVDKSRW | | ID NO: 41) | GQGTKVE | TKSFNRG |
| | (SEQ ID | QQGNVFSCSVMHEALHNHYT | | | IK (SEQ | EC (SEQ |
| | NO: 591) | QKSLSLSPG (SEQ ID | | | ID NO: | ID NO: |
| | | NO: 44) | | | 1363) | 45) |
| MIAB | EVQLLESG | ASTKGPSVFPLAPSSKSTSG | GGGGS | APTSSSTKKT | DIQMTQS | RTVAAPS |
| 146 | GGLVQPGG | GTAALGCLVKDYFPEPVTVS | (SEQ | QLQLEHLLLD | PSSLSAS | VFIFPPS |
| | SLRLSCAA | WNSGALTSGVHTFPAVLQSS | ID NO: | LQMILNGINN | VGDRVTI | DEQLKSG |
| | SGFTESDE | GLYSLSSVVTVPSSSLGTQT | 23) | YKNPKLTRML | TCRASQS | TASVVCL |
| | WMHWVRQA | YICNVNHKPSNTKVDKKVEP | | TFKFYMPKKA | VSSSLAW | LNNFYPR |
| | PGKGLEWI | KSCDKTHTCPPCPAPEAAGA | | TELKHLQCLE | YQQKPGK | EAKVQWK |
| | SYISGDSG | PSVFLFPPKPKDTLMISRTP | | EELKPLEEAL | APKLLIY | VDNALQS |
| | YTNYADSV | EVTCVVVDVSHEDPEVKENW | | NLAPSKNEHL | AASSLQS | GNSQESV |
| | KGRFTISR | YVDGVEVHNAKTKPREEQYN | | RPRDLISDIN | GVPSRES | TEQDSKD |
| | DNSKNTLY | STYRVVSVLTVLHQDWLNGK | | VIVLELKGSE | GSGSGTD | STYSLSS |
| | LQMNSLRA | EYKCKVSNKALPAPIEKTIS | | TTEMCEYADE | FTLTISS | TLTLSKA |
| | EDTAVYYC | KAKGQPREPQVYTLPPSREE | | TATIVEFINR | LQPEDFA | DYEKHKV |
| | ARDRPYYY | MTKNQVSLTCLVKGFYPSDI | | WITFSQSIIS | TYYCQQY | YACEVTH |
| | YMDVWGKG | AVEWESNGQPENNYKTTPPV | | TLT (SEQ | KSYPVTF | QGLSSPV |
| | TTVTVSS | LDSDGSFFLYSKLTVDKSRW | | ID NO: 41) | GQGTKVE | TKSENRG |
| | (SEQ ID | QQGNVFSCSVMHEALHNHYT | | | IK (SEQ | EC (SEQ |
| | NO: 591) | QKSLSLSPG (SEQ ID | | | ID NO: | ID NO: |
| | | NO: 44) | | | 1364) | 45) |
| MIAB | EVQLLESG | ASTKGPSVFPLAPSSKSTSG | GGGGS | APTSSSTKKT | DIQMTQS | RTVAAPS |
| 147 | GGLVQPGG | GTAALGCLVKDYFPEPVTVS | (SEQ | QLQLEHLLLD | PSSLSAS | VFIFPPS |
| | SLRLSCAA | WNSGALTSGVHTFPAVLQSS | ID NO: | LQMILNGINN | VGDRVTI | DEQLKSG |
| | SGFTFSDE | GLYSLSSVVTVPSSSLGTQT | 23) | YKNPKLTRML | TCRASQS | TASVVCL |
| | WMHWVRQA | YICNVNHKPSNTKVDKKVEP | | TFKFYMPKKA | VSRYLAW | LNNFYPR |
| | PGKGLEWI | KSCDKTHTCPPCPAPEAAGA | | TELKHLQCLE | YQQKPGK | EAKVQWK |
| | SYISGDSG | PSVFLFPPKPKDTLMISRTP | | EELKPLEEAL | APKLLIY | VDNALQS |
| | YTNYADSV | EVTCVVVDVSHEDPEVKENW | | NLAPSKNEHL | AASSLQS | GNSQESV |
| | KGRFTISR | YVDGVEVHNAKTKPREEQYN | | RPRDLISDIN | GVPSRFS | TEQDSKD |
| | DNSKNTLY | STYRVVSVLTVLHQDWLNGK | | VIVLELKGSE | GSGSGTD | STYSLSS |
| | LQMNSLRA | EYKCKVSNKALPAPIEKTIS | | TTFMCEYADE | FTLTISS | TLTLSKA |
| | EDTAVYYC | KAKGQPREPQVYTLPPSREE | | TATIVEFINR | LQPEDFA | DYEKHKV |
| | ARDRPYYY | MTKNQVSLTCLVKGFYPSDI | | WITFSQSIIS | TYYCQQY | YACEVTH |
| | YMDVWGKG | AVEWESNGQPENNYKTTPPV | | TLT (SEQ | KSYPVTF | QGLSSPV |
| | TTVTVSS | LDSDGSFFLYSKLTVDKSRW | | ID NO: 41) | GQGTKVE | TKSENRG |
| | (SEQ ID | QQGNVFSCSVMHEALHNHYT | | | IK (SEQ | EC (SEQ |
| | NO: 591) | QKSLSLSPG (SEQ ID | | | ID NO: | ID NO: |
| | | NO: 44) | | | 1365) | 45) |
| MIAB | EVQLLESG | ASTKGPSVFPLAPSSKSTSG | GGGGS | APTSSSTKKT | DIQMTQS | RTVAAPS |
| 148 | GGLVQPGG | GTAALGCLVKDYFPEPVTVS | (SEQ | QLQLEHLLLD | PSSLSAS | VFIFPPS |
| | SLRLSCAA | WNSGALTSGVHTFPAVLQSS | ID NO: | LQMILNGINN | VGDRVTI | DEQLKSG |
| | SGFTESDE | GLYSLSSVVTVPSSSLGTQT | 23) | YKNPKLTRML | TCRASQS | TASVVCL |
| | WMHWVRQA | YICNVNHKPSNTKVDKKVEP | | TFKFYMPKKA | VSRSLNW | LNNFYPR |
| | PGKGLEWI | KSCDKTHTCPPCPAPEAAGA | | TELKHLQCLE | YQQKPGK | EAKVQWK |
| | SYISGDSG | PSVFLFPPKPKDTLMISRTP | | EELKPLEEAL | APKLLIY | VDNALQS |
| | YTNYADSV | EVTCVVVDVSHEDPEVKENW | | NLAPSKNFHL | AASSLQS | GNSQESV |
| | KGRFTISR | YVDGVEVHNAKTKPREEQYN | | RPRDLISDIN | GVPSRES | TEQDSKD |
| | DNSKNTLY | STYRVVSVLTVLHQDWLNGK | | VIVLELKGSE | GSGSGTD | STYSLSS |
| | LQMNSLRA | EYKCKVSNKALPAPIEKTIS | | TTEMCEYADE | FTLTISS | TLTLSKA |
| | EDTAVYYC | KAKGQPREPQVYTLPPSREE | | TATIVEFINR | LQPEDFA | DYEKHKV |
| | ARDRPYYY | MTKNQVSLTCLVKGFYPSDI | | WITFSQSIIS | TYYCQQY | YACEVTH |
| | YMDVWGKG | AVEWESNGQPENNYKTTPPV | | TLT (SEQ | KSYPVTF | QGLSSPV |
| | TTVTVSS | LDSDGSFFLYSKLTVDKSRW | | ID NO: 41) | GQGTKVE | TKSENRG |
| | (SEQ ID | QQGNVFSCSVMHEALHNHYT | | | IK (SEQ | EC (SEQ |
| | NO: 591) | QKSLSLSPG (SEQ ID | | | ID NO: | ID NO: |
| | | NO: 44) | | | 1366) | 45) |
| MIAB | EVQLLESG | ASTKGPSVFPLAPSSKSTSG | GGGGS | APTSSSTKKT | DIQMTQS | RTVAAPS |
| 149 | GGLVQPGG | GTAALGCLVKDYFPEPVTVS | (SEQ | QLQLEHLLLD | PSSLSAS | VFIFPPS |
| | SLRLSCAA | WNSGALTSGVHTFPAVLQSS | ID NO: | LQMILNGINN | VGDRVTI | DEQLKSG |
| | SGFTESDE | GLYSLSSVVTVPSSSLGTQT | 23) | YKNPKLTRML | TCRASQS | TASVVCL |
| | WMHWVRQA | YICNVNHKPSNTKVDKKVEP | | TFKFYMPKKA | ISSSLAW | LNNFYPR |
| | PGKGLEWI | KSCDKTHTCPPCPAPEAAGA | | TELKHLQCLE | YQQKPGK | EAKVQWK |
| | SYISGDSG | PSVFLFPPKPKDTLMISRTP | | EELKPLEEAL | APKLLIY | VDNALQS |
| | YTNYADSV | EVTCVVVDVSHEDPEVKENW | | NLAPSKNFHL | AASSLQS | GNSQESV |
| | KGRFTISR | YVDGVEVHNAKTKPREEQYN | | RPRDLISDIN | GVPSRFS | TEQDSKD |
| | DNSKNTLY | STYRVVSVLTVLHQDWLNGK | | VIVLELKGSE | GSGSGTD | STYSLSS |
| | LQMNSLRA | EYKCKVSNKALPAPIEKTIS | | TTFMCEYADE | FTLTISS | TLTLSKA |
| | EDTAVYYC | KAKGQPREPQVYTLPPSREE | | TATIVEFINR | LQPEDFA | DYEKHKV |
| | ARDRPYYY | MTKNQVSLTCLVKGFYPSDI | | WITFSQSIIS | TYYCQQY | YACEVTH |
| | YMDVWGKG | AVEWESNGQPENNYKTTPPV | | TLT (SEQ | KSYPVTF | GLSSPV |
| | TTVTVSS | LDSDGSFFLYSKLTVDKSRW | | ID NO: 41) | GQGTKVE | TKSENRG |
| | (SEQ ID | QQGNVFSCSVMHEALHNHYT | | | IK (SEQ | EC (SEQ |
| | NO: 591) | QKSLSLSPG (SEQ ID | | | ID NO: | ID NO: |
| | | NO: 44) | | | 1367) | 45) |
| MIAB | EVQLLESG | ASTKGPSVFPLAPSSKSTSG | GGGGS | APTSSSTKKT | DIQMTQS | RTVAAPS |
| 150 | GGLVQPGG | GTAALGCLVKDYFPEPVTVS | (SEQ | QLQLEHLLLD | PSSLSAS | VFIFPPS |
| | SLRLSCAA | WNSGALTSGVHTFPAVLQSS | ID NO: | LQMILNGINN | VGDRVTI | DEQLKSG |
| | SGFTESDE | GLYSLSSVVTVPSSSLGTQT | 23) | YKNPKLTRML | TCRASQS | TASVVCL |
| | WMHWVRQA | YICNVNHKPSNTKVDKKVEP | | TFKFYMPKKA | ISRYLAW | LNNFYPR |
| | PGKGLEWI | KSCDKTHTCPPCPAPEAAGA | | TELKHLQCLE | YQQKPGK | EAKVQWK |
| | SYISGDSG | PSVFLFPPKPKDTLMISRTP | | EELKPLEEAL | APKLLIY | VDNALQS |
| | YTNYADSV | EVTCVVVDVSHEDPEVKENW | | NLAPSKNFHL | AASSLQS | GNSQESV |
| | KGRFTISR | YVDGVEVHNAKTKPREEQYN | | RPRDLISDIN | GVPSRES | TEQDSKD |
| | DNSKNTLY | STYRVVSVLTVLHQDWLNGK | | VIVLELKGSE | GSGSGTD | STYSLSS |
| | LQMNSLRA | EYKCKVSNKALPAPIEKTIS | | TTEMCEYADE | FTLTISS | TLTLSKA |
| | EDTAVYYC | KAKGQPREPQVYTLPPSREE | | TATIVEFINR | LQPEDFA | DYEKHKV |
| | ARDRPYYY | MTKNQVSLTCLVKGFYPSDI | | WITFSQSIIS | TYYCQQY | YACEVTH |
| | YMDVWGKG | AVEWESNGQPENNYKTTPPV | | TLT (SEQ | KSYPVTF | QGLSSPV |
| | TTVTVSS | LDSDGSFFLYSKLTVDKSRW | | ID NO: 41) | GQGTKVE | TKSENRG |
| | (SEQ ID | QQGNVFSCSVMHEALHNHYT | | | IK (SEQ | EC (SEQ |
| | NO: 591) | QKSLSLSPG (SEQ ID | | | ID NO: | ID NO: |
| | | NO: 44) | | | 1368) | 45) |
| MIAB | EVQLLESG | ASTKGPSVFPLAPSSKSTSG | GGGGS | APTSSSTKKT | DIQMTQS | RTVAAPS |
| 151 | GGLVQPGG | GTAALGCLVKDYFPEPVTVS | (SEQ | QLQLEHLLLD | PSSLSAS | VFIFPPS |
| | SLRLSCAA | WNSGALTSGVHTEPAVLQSS | ID NO: | LQMILNGINN | VGDRVTI | DEQLKSG |
| | SGFTESDE | GLYSLSSVVTVPSSSLGTQT | 23) | YKNPKLTRML | TCRASQS | TASVVCL |
| | WMHWVRQA | YICNVNHKPSNTKVDKKVEP | | TFKFYMPKKA | ISRSLNW | LNNFYPR |
| | PGKGLEWI | KSCDKTHTCPPCPAPEAAGA | | TELKHLQCLE | YQQKPGK | EAKVQWK |
| | SYISGDSG | PSVFLFPPKPKDTLMISRTP | | EELKPLEEAL | APKLLIY | VDNALQS |
| | YTNYADSV | EVTCVVVDVSHEDPEVKENW | | NLAPSKNFHL | AASSLQS | GNSQESV |
| | KGRFTISR | YVDGVEVHNAKTKPREEQYN | | RPRDLISDIN | GVPSRES | TEQDSKD |
| | DNSKNTLY | STYRVVSVLTVLHQDWLNGK | | VIVLELKGSE | GSGSGTD | STYSLSS |
| | LQMNSLRA | EYKCKVSNKALPAPIEKTIS | | TTEMCEYADE | FTLTISS | TLTLSKA |
| | EDTAVYYC | KAKGQPREPQVYTLPPSREE | | TATIVEFINR | LQPEDFA | DYEKHKV |
| | ARDRPYYY | MTKNQVSLTCLVKGFYPSDI | | WITFSQSIIS | TYYCQQY | YACEVTH |
| | YMDVWGKG | AVEWESNGQPENNYKTTPPV | | TLT (SEQ | KSYPVTF | QGLSSPV |
| | TTVTVSS | LDSDGSFFLYSKLTVDKSRW | | ID NO: 41) | GQGTKVE | TKSFNRG |
| | (SEQ ID | QQGNVFSCSVMHEALHNHYT | | | IK (SEQ | EC (SEQ |
| | NO: 591) | QKSLSLSPG (SEQ ID | | | ID NO: | ID NO: |
| | | NO: 44) | | | 1369) | 45) |
| MIAB | EVQLLESG | ASTKGPSVFPLAPSSKSTSG | GGGGS | APTSSSTKKT | DIQMTQS | RTVAAPS |
| 152 | GGLVQPGG | GTAALGCLVKDYFPEPVTVS | SEQ | QLQLEHLLLD | PSSLSAS | VFIFPPS |
| | SLRLSCAA | WNSGALTSGVHTFPAVLQSS | ID NO: | LQMILNGINN | VGDRVTI | DEQLKSG |
| | SGFTESDE | GLYSLSSVVTVPSSSLGTQT | 23) | YKNPKLTRML | TCRASQS | TASVVCL |
| | WMHWVRQA | YICNVNHKPSNTKVDKKVEP | | TFKFYMPKKA | VSSYLAW | LNNFYPR |
| | PGKGLEWI | KSCDKTHTCPPCPAPEAAGA | | TELKHLQCLE | YQQKPGK | EAKVQWK |
| | SYISGDSG | PSVFLFPPKPKDTLMISRTP | | EELKPLEEAL | APKLLIY | VDNALQS |
| | YTNYADSV | EVTCVVVDVSHEDPEVKENW | | NLAPSKNFHL | AASSLQS | GNSQESV |
| | KGRFTISR | YVDGVEVHNAKTKPREEQYN | | RPRDLISDIN | GVPSRFS | TEQDSKD |
| | DNSKNTLY | STYRVVSVLTVLHQDWLNGK | | VIVLELKGSE | GSGSGTD | STYSLSS |
| | LQMNSLRA | EYKCKVSNKALPAPIEKTIS | | TTFMCEYADE | FTLTISS | TLTLSKA |
| | EDTAVYYC | KAKGQPREPQVYTLPPSREE | | TATIVEFINR | LQPEDFA | DYEKHKV |
| | ARDRPYYY | MTKNQVSLTCLVKGFYPSDI | | WITFSQSIIS | TYYCQQY | YACEVTH |
| | YMDVWGKG | AVEWESNGQPENNYKTTPPV | | TLT (SEQ | KSYPVTF | QGLSSPV |
| | TTVTVSS | LDSDGSFFLYSKLTVDKSRW | | ID NO: 41) | GQGTKVE | TKSENRG |
| | (SEQ ID | QQGNVFSCSVMHEALHNHYT | | | IK (SEQ | EC (SEQ |
| | NO: 591) | QKSLSLSPG (SEQ ID | | | ID NO: | ID NO: |
| | | NO: 44) | | | 1370) | 45) |
| MIAB | EVQLLESG | ASTKGPSVFPLAPSSKSTSG | GGGGS | APTSSSTKKT | DIQMTQS | RTVAAPS |
| 153 | GGLVQPGG | GTAALGCLVKDYFPEPVTVS | (SEQ | QLQLEHLLLD | PSSLSAS | VFIFPPS |
| | SLRLSCAA | WNSGALTSGVHTFPAVLQSS | ID NO: | LQMILNGINN | VGDRVTI | DEQLKSG |
| | SGFTESDE | GLYSLSSVVTVPSSSLGTQT | 23) | YKNPKLTRML | TCRASQS | TASVVCL |
| | WMHWVRQA | YICNVNHKPSNTKVDKKVEP | | TFKFYMPKKA | VSSSLNW | LNNFYPR |
| | PGKGLEWI | KSCDKTHTCPPCPAPEAAGA | | TELKHLQCLE | YQQKPGK | EAKVQWK |
| | SYISGDSG | PSVFLFPPKPKDTLMISRTP | | EELKPLEEAL | APKLLIY | VDNALQS |
| | YTNYADSV | EVTCVVVDVSHEDPEVKENW | | NLAPSKNFHL | AASSLQS | GNSQESV |
| | KGRFTISR | YVDGVEVHNAKTKPREEQYN | | RPRDLISDIN | GVPSRES | TEQDSKD |
| | DNSKNTLY | STYRVVSVLTVLHQDWLNGK | | VIVLELKGSE | GSGSGTD | STYSLSS |
| | LQMNSLRA | EYKCKVSNKALPAPIEKTIS | | TTFMCEYADE | FTLTISS | TLTLSKA |
| | EDTAVYYC | KAKGQPREPQVYTLPPSREE | | TATIVEFINR | LQPEDFA | DYEKHKV |
| | ARDRPYYY | MTKNQVSLTCLVKGFYPSDI | | WITFSQSIIS | TYYCQQY | YACEVTH |
| | YMDVWGKG | AVEWESNGQPENNYKTTPPV | | TLT (SEQ | KSYPVTF | QGLSSPV |
| | TTVTVSS | LDSDGSFFLYSKLTVDKSRW | | ID NO: 41) | GQGTKVE | TKSFNRG |
| | (SEQ ID | QQGNVFSCSVMHEALHNHYT | | | IK (SEQ | EC (SEQ |
| | NO: 591) | QKSLSLSPG (SEQ ID | | | ID NO: | ID NO: |
| | | NO: 44) | | | 1371) | 45) |
| MIAB | EVQLLESG | ASTKGPSVFPLAPSSKSTSG | GGGGS | APTSSSTKKT | DIQMTQS | RTVAAPS |
| 154 | GGLVQPGG | GTAALGCLVKDYFPEPVTVS | (SEQ | QLQLEHLLLD | PSSLSAS | VFIFPPS |
| | SLRLSCAA | WNSGALTSGVHTFPAVLQSS | ID NO: | LQMILNGINN | VGDRVTI | DEQLKSG |
| | SGFTESDE | GLYSLSSVVTVPSSSLGTQT | 23) | YKNPKLTRML | TCRASQS | TASVVCL |
| | WMHWVRQA | YICNVNHKPSNTKVDKKVEP | | TFKFYMPKKA | VSRYLNW | LNNFYPR |
| | PGKGLEWI | KSCDKTHTCPPCPAPEAAGA | | TELKHLQCLE | YQQKPGK | EAKVQWK |
| | SYISGDSG | PSVFLFPPKPKDTLMISRTP | | EELKPLEEAL | APKLLIY | VDNALQS |
| | YTNYADSV | EVTCVVVDVSHEDPEVKENW | | NLAPSKNEHL | AASSLQS | GNSQESV |
| | KGRFTISR | YVDGVEVHNAKTKPREEQYN | | RPRDLISDIN | GVPSRES | TEQDSKD |
| | DNSKNTLY | STYRVVSVLTVLHQDWLNGK | | VIVLELKGSE | GSGSGTD | STYSLSS |
| | LQMNSLRA | EYKCKVSNKALPAPIEKTIS | | TTEMCEYADE | FTLTISS | TLTLSKA |
| | EDTAVYYC | KAKGQPREPQVYTLPPSREE | | TATIVEFINR | LQPEDFA | DYEKHKV |
| | ARDRPYYY | MTKNQVSLTCLVKGFYPSDI | | WITFSQSIIS | TYYCQQY | YACEVTH |
| | YMDVWGKG | AVEWESNGQPENNYKTTPPV | | TLT (SEQ | KSYPVTF | QGLSSPV |
| | TTVTVSS | LDSDGSFFLYSKLTVDKSRW | | ID NO: 41) | GQGTKVE | TKSFNRG |
| | (SEQ ID | QQGNVFSCSVMHEALHNHYT | | | IK (SEQ | EC (SEQ |
| | NO: 591) | QKSLSLSPG (SEQ ID | | | ID NO: | ID NO: |
| | | NO: 44) | | | 1372) | 45) |
| MIAB | EVQLLESG | ASTKGPSVFPLAPSSKSTSG | GGGGS | APTSSSTKKT | DIQMTQS | RTVAAPS |
| 155 | GGLVQPGG | GTAALGCLVKDYFPEPVTVS | (SEQ | QLQLEHLLLD | PSSLSAS | VFIFPPS |
| | SLRLSCAA | WNSGALTSGVHTFPAVLQSS | ID NO: | LQMILNGINN | VGDRVTI | DEQLKSG |
| | SGFTESDE | GLYSLSSVVTVPSSSLGTQT | 23) | YKNPKLTRML | TCRASQS | TASVVCL |
| | WMHWVRQA | YICNVNHKPSNTKVDKKVEP | | TFKFYMPKKA | ISSSLNW | LNNFYPR |
| | PGKGLEWI | KSCDKTHTCPPCPAPEAAGA | | TELKHLQCLE | YQQKPGK | EAKVQWK |
| | SYISGDSG | PSVFLFPPKPKDTLMISRTP | | EELKPLEEAL | APKLLIY | VDNALQS |
| | YTNYADSV | EVTCVVVDVSHEDPEVKENW | | NLAPSKNFHL | AASSLQS | GNSQESV |
| | KGRFTISR | YVDGVEVHNAKTKPREEQYN | | RPRDLISDIN | GVPSRES | TEQDSKD |
| | DNSKNTLY | STYRVVSVLTVLHQDWLNGK | | VIVLELKGSE | GSGSGTD | STYSLSS |
| | LQMNSLRA | EYKCKVSNKALPAPIEKTIS | | TTFMCEYADE | FTLTISS | TLTLSKA |
| | EDTAVYYC | KAKGQPREPQVYTLPPSREE | | TATIVEFINR | LQPEDFA | DYEKHKV |
| | ARDRPYYY | MTKNQVSLTCLVKGFYPSDI | | WITFSQSIIS | TYYCQQY | YACEVTH |
| | YMDVWGKG | AVEWESNGQPENNYKTTPPV | | TLT (SEQ | KSYPVTF | QGLSSPV |
| | TTVTVSS | LDSDGSFFLYSKLTVDKSRW | | ID NO: 41) | GQGTKVE | TKSENRG |
| | (SEQ ID | QQGNVFSCSVMHEALHNHYT | | | IK (SEQ | EC (SEQ |
| | NO: 591) | QKSLSLSPG (SEQ ID | | | ID NO: | ID NO: |
| | | NO: 44) | | | 1373) | 45) |
| MIAB | EVQLLESG | ASTKGPSVFPLAPSSKSTSG | GGGGS | APTSSSTKKT | DIQMTQS | RTVAAPS |
| 156 | GGLVQPGG | GTAALGCLVKDYFPEPVTVS | (SEQ | QLQLEHLLLD | PSSLSAS | VFIFPPS |
| | SLRLSCAA | WNSGALTSGVHTEPAVLQSS | ID NO: | LQMILNGINN | VGDRVTI | DEQLKSG |
| | SGFTESDE | GLYSLSSVVTVPSSSLGTQT | 23) | YKNPKLTRML | TCRASQS | TASVVCL |
| | WMHWVRQA | YICNVNHKPSNTKVDKKVEP | | TFKFYMPKKA | ISRYLNW | LNNFYPR |
| | PGKGLEWI | KSCDKTHTCPPCPAPEAAGA | | TELKHLQCLE | YQQKPGK | EAKVQWK |
| | SYISGDSG | PSVFLFPPKPKDTLMISRTP | | EELKPLEEAL | APKLLIY | VDNALQS |
| | YTNYADSV | EVTCVVVDVSHEDPEVKENW | | NLAPSKNFHL | AASSLQS | GNSQESV |
| | KGRFTISR | YVDGVEVHNAKTKPREEQYN | | RPRDLISDIN | GVPSRES | TEQDSKD |
| | DNSKNTLY | STYRVVSVLTVLHQDWLNGK | | VIVLELKGSE | GSGSGTD | STYSLSS |
| | LQMNSLRA | EYKCKVSNKALPAPIEKTIS | | TTFMCEYADE | FTLTISS | TLTLSKA |
| | EDTAVYYC | KAKGQPREPQVYTLPPSREE | | TATIVEFINR | LQPEDFA | DYEKHKV |
| | ARDRPYYY | MTKNQVSLTCLVKGFYPSDI | | WITFSQSIIS | TYYCQQY | YACEVTH |
| | YMDVWGKG | AVEWESNGQPENNYKTTPPV | | TLT (SEQ | KSYPVTF | QGLSSPV |
| | TTVTVSS | LDSDGSFFLYSKLTVDKSRW | | ID NO: 41) | GQGTKVE | TKSENRG |
| | (SEQ ID | QQGNVFSCSVMHEALHNHYT | | | IK (SEQ | EC (SEQ |
| | NO: 591) | QKSLSLSPG (SEQ ID | | | ID NO: | ID NO: |
| | | NO: 44) | | | 1374) | 45) |
| MIAB | EVQLLESG | ASTKGPSVFPLAPSSKSTSG | GGGGS | APTSSSTKKT | DIQMTQS | RTVAAPS |
| 157 | GGLVQPGG | GTAALGCLVKDYFPEPVTVS | (SEQ | QLQLEHLLLD | PSSLSAS | VFIFPPS |
| | SLRLSCAA | WNSGALTSGVHTFPAVLQSS | ID NO: | LQMILNGINN | VGDRVTI | DEQLKSG |
| | SGFTESDE | GLYSLSSVVTVPSSSLGTQT | 23) | YKNPKLTRML | TCRASQS | TASVVCL |
| | WMHWVRQA | YICNVNHKPSNTKVDKKVEP | | TFKFYMPKKA | ISSYLAW | LNNFYPR |
| | PGKGLEWI | KSCDKTHTCPPCPAPEAAGA | | TELKHLQCLE | YQQKPGK | EAKVQWK |
| | SYISGDSG | PSVFLFPPKPKDTLMISRTP | | EELKPLEEAL | APKLLIY | VDNALQS |
| | YTNYADSV | EVTCVVVDVSHEDPEVKENW | | NLAPSKNEHL | AASSLQS | GNSQESV |
| | KGRFTISR | YVDGVEVHNAKTKPREEQYN | | RPRDLISDIN | GVPSRES | TEQDSKD |
| | DNSKNTLY | STYRVVSVLTVLHQDWLNGK | | VIVLELKGSE | GSGSGTD | STYSLSS |
| | LQMNSLRA | EYKCKVSNKALPAPIEKTIS | | TTFMCEYADE | FTLTISS | TLTLSKA |
| | EDTAVYYC | KAKGQPREPQVYTLPPSREE | | TATIVEFINR | LQPEDFA | DYEKHKV |
| | ARDRPYYY | MTKNQVSLTCLVKGFYPSDI | | WITFSQSIIS | TYYCQQY | YACEVTH |
| | YMDVWGKG | AVEWESNGQPENNYKTTPPV | | TLT (SEQ | KSYPVTE | QGLSSPV |
| | TTVTVSS | LDSDGSFFLYSKLTVDKSRW | | ID NO: 41) | GQGTKVE | TKSENRG |
| | (SEQ ID | QQGNVFSCSVMHEALHNHYT | | | IK (SEQ | EC (SEQ |
| | NO: 591) | QKSLSLSPG (SEQ ID | | | ID NO: | ID NO: |
| | | NO: 44) | | | 1375) | 45) |
| MIAB | EVQLLESG | ASTKGPSVFPLAPSSKSTSG | GGGGS | APTSSSTKKT | DIQMTQS | RTVAAPS |
| 158 | GGLVQPGG | GTAALGCLVKDYFPEPVTVS | (SEQ | QLQLEHLLLD | PSSLSAS | VFIFPPS |
| | SLRLSCAA | WNSGALTSGVHTFPAVLQSS | ID NO: | LQMILNGINN | VGDRVTI | DEQLKSG |
| | SGFTESDE | GLYSLSSVVTVPSSSLGTQT | 23) | YKNPKLTRML | TCRASQS | TASVVCL |
| | WMHWVRQA | YICNVNHKPSNTKVDKKVEP | | TFKFYMPKKA | VSSYLNW | LNNFYPR |
| | PGKGLEWI | KSCDKTHTCPPCPAPEAAGA | | TELKHLQCLE | YQQKPGK | EAKVQWK |
| | SYISGDSG | PSVELFPPKPKDTLMISRTP | | EELKPLEEAL | APKLLIY | VDNALQS |
| | YTNYADSV | EVTCVVVDVSHEDPEVKENW | | NLAPSKNEHL | AASSLQS | GNSQESV |
| | KGRFTISR | YVDGVEVHNAKTKPREEQYN | | RPRDLISDIN | GVPSRFS | TEQDSKD |
| | DNSKNTLY | STYRVVSVLTVLHQDWLNGK | | VIVLELKGSE | GSGSGTD | STYSLSS |
| | LQMNSLRA | EYKCKVSNKALPAPIEKTIS | | TTFMCEYADE | FTLTISS | TLTLSKA |
| | EDTAVYYC | KAKGQPREPQVYTLPPSREE | | TATIVEFINR | LQPEDFA | DYEKHKV |
| | ARDRPYYY | MTKNQVSLTCLVKGFYPSDI | | WITFSQSIIS | TYYCQQY | YACEVTH |
| | YMDVWGKG | AVEWESNGQPENNYKTTPPV | | TLT (SEQ | KSYPVTF | QGLSSPV |
| | TTVTVSS | LDSDGSFFLYSKLTVDKSRW | | ID NO: 41) | GQGTKVE | TKSENRG |
| | (SEQ ID | QQGNVFSCSVMHEALHNHYT | | | IK (SEQ | EC (SEQ |
| | NO: 591) | QKSLSLSPG (SEQ ID | | | ID NO: | ID NO: |
| | | NO: 44) | | | 1376) | 45) |
| MIAB | EVQLLESG | ASTKGPSVFPLAPSSKSTSG | GGGGS | APTSSSTKKT | DIQMTQS | RTVAAPS |
| 159 | GGLVQPGG | GTAALGCLVKDYFPEPVTVS | (SEQ | QLQLEHLLLD | PSSLSAS | VFIFPPS |
| | SLRLSCAA | WNSGALTSGVHTFPAVLQSS | ID NO: | LQMILNGINN | VGDRVTI | DEQLKSG |
| | SGFTESDE | GLYSLSSVVTVPSSSLGTQT | 23) | YKNPKLTRML | TCRASQS | TASVVCL |
| | WMHWVRQA | YICNVNHKPSNTKVDKKVEP | | TFKFYMPKKA | VSRSLAW | LNNFYPR |
| | PGKGLEWI | KSCDKTHTCPPCPAPEAAGA | | TELKHLQCLE | YQQKPGK | EAKVQWK |
| | SYISGESG | PSVFLFPPKPKDTLMISRTP | | EELKPLEEAL | APKLLIY | VDNALQS |
| | YTNYADSV | EVTCVVVDVSHEDPEVKENW | | NLAPSKNFHL | AASSLQS | GNSQESV |
| | KGRFTISR | YVDGVEVHNAKTKPREEQYN | | RPRDLISDIN | GVPSRFS | TEQDSKD |
| | DNSKNTLY | STYRVVSVLTVLHQDWLNGK | | VIVLELKGSE | GSGSGTD | STYSLSS |
| | LQMNSLRA | EYKCKVSNKALPAPIEKTIS | | TTFMCEYADE | FTLTISS | TLTLSKA |
| | EDTAVYYC | KAKGQPREPQVYTLPPSREE | | TATIVEFINR | LQPEDFA | DYEKHKV |
| | ARDRPYYY | MTKNQVSLTCLVKGFYPSDI | | WITFSQSIIS | TYYCQQY | YACEVTH |
| | YMDVWGKG | AVEWESNGQPENNYKTTPPV | | TLT (SEQ | KSYPVTF | QGLSSPV |
| | TTVTVSS | LDSDGSFFLYSKLTVDKSRW | | ID NO: 41) | GQGTKVE | TKSFNRG |
| | (SEQ ID | QQGNVFSCSVMHEALHNHYT | | | IK (SEQ | EC (SEQ |
| | NO: | QKSLSLSPG (SEQ ID | | | ID NO: | ID NO: |
| | 1377) | NO: 44) | | | 592) | 45) |
| MIAB | EVQLLESG | ASTKGPSVFPLAPSSKSTSG | GGGGS | APTSSSTKKT | DIQMTQS | RTVAAPS |
| 160 | GGLVQPGG | GTAALGCLVKDYFPEPVTVS | (SEQ | QLQLEHLLLD | PSSLSAS | VFIFPPS |
| | SLRLSCAA | WNSGALTSGVHTFPAVLQSS | ID NO: | LQMILNGINN | VGDRVTI | DEQLKSG |
| | SGFTESDE | GLYSLSSVVTVPSSSLGTQT | 23) | YKNPKLTRML | TCRASQS | TASVVCL |
| | WMHWVRQA | YICNVNHKPSNTKVDKKVEP | | TFKFYMPKKA | VSRSLAW | LNNFYPR |
| | PGKGLEWI | KSCDKTHTCPPCPAPEAAGA | | TELKHLQCLE | YQQKPGK | EAKVQWK |
| | SYISGDSG | PSVFLFPPKPKDTLMISRTP | | EELKPLEEAL | APKLLIY | VDNALQS |
| | YTQYADSV | EVTCVVVDVSHEDPEVKENW | | NLAPSKNEHL | AASSLQS | GNSQESV |
| | KGRFTISR | YVDGVEVHNAKTKPREEQYN | | RPRDLISDIN | GVPSRES | TEQDSKD |
| | DNSKNTLY | STYRVVSVLTVLHQDWLNGK | | VIVLELKGSE | GSGSGTD | STYSLSS |
| | LQMNSLRA | EYKCKVSNKALPAPIEKTIS | | TTEMCEYADE | FTLTISS | TLTLSKA |
| | EDTAVYYC | KAKGQPREPQVYTLPPSREE | | TATIVEFINR | LQPEDFA | DYEKHKV |
| | ARDRPYYY | MTKNQVSLTCLVKGFYPSDI | | WITFSQSIIS | TYYCQQY | YACEVTH |
| | YMDVWGKG | AVEWESNGQPENNYKTTPPV | | TLT (SEQ | KSYPVTF | QGLSSPV |
| | TTVTVSS | LDSDGSFFLYSKLTVDKSRW | | ID NO: 41) | GQGTKVE | TKSENRG |
| | (SEQ ID | QQGNVFSCSVMHEALHNHYT | | | IK (SEQ | EC (SEQ |
| | NO: | QKSLSLSPG (SEQ ID | | | ID NO: | ID NO: |
| | 1378) | NO: 44) | | | 592) | 45) |
| MIAB | EVQLLESG | ASTKGPSVFPLAPSSKSTSG | GGGGS | APTSSSTKKT | DIQMTQS | RTVAAPS |
| 161 | GGLVQPGG | GTAALGCLVKDYFPEPVTVS | (SEQ | QLQLEHLLLD | PSSLSAS | VFIFPPS |
| | SLRLSCAA | WNSGALTSGVHTFPAVLQSS | ID NO: | LQMILNGINN | VGDRVTI | DEQLKSG |
| | SGFTESDE | GLYSLSSVVTVPSSSLGTQT | 23) | YKNPKLTRML | TCRASQS | TASVVCL |
| | WMHWVRQA | YICNVNHKPSNTKVDKKVEP | | TFKFYMPKKA | VSRSLAW | LNNFYPR |
| | PGKGLEWI | KSCDKTHTCPPCPAPEAAGA | | TELKHLQCLE | YQQKPGK | EAKVQWK |
| | SYISGDSG | PSVFLFPPKPKDTLMISRTP | | EELKPLEEAL | APKLLIY | VDNALQS |
| | YTNYADSV | EVTCVVVDVSHEDPEVKENW | | NLAPSKNFHL | AASSLQS | GNSQESV |
| | KGRFTISR | YVDGVEVHNAKTKPREEQYN | | RPRDLISDIN | GVPSRES | TEQDSKD |
| | DQSKNTLY | STYRVVSVLTVLHQDWLNGK | | VIVLELKGSE | GSGSGTD | STYSLSS |
| | LQMNSLRA | EYKCKVSNKALPAPIEKTIS | | TTFMCEYADE | FTLTISS | TLTLSKA |
| | EDTAVYYC | KAKGQPREPQVYTLPPSREE | | TATIVEFINR | LQPEDFA | DYEKHKV |
| | ARDRPYYY | MTKNQVSLTCLVKGFYPSDI | | WITFSQSIIS | TYYCQQY | YACEVTH |
| | YMDVWGKG | AVEWESNGQPENNYKTTPPV | | TLT (SEQ | KSYPVTE | QGLSSPV |
| | TTVTVSS | LDSDGSFFLYSKLTVDKSRW | | ID NO: 41) | GQGTKVE | TKSENRG |
| | (SEQ ID | QQGNVFSCSVMHEALHNHYT | | | IK (SEQ | EC (SEQ |
| | NO: | QKSLSLSPG (SEQ ID | | | ID NO: | ID NO: |
| | 1379) | NO: 44) | | | 592) | 45) |
| MIAB | EVQLLESG | ASTKGPSVFPLAPSSKSTSG | GGGGS | APTSSSTKKT | DIQMTQS | RTVAAPS |
| 162 | GGLVQPGG | GTAALGCLVKDYFPEPVTVS | (SEQ | QLQLEHLLLD | PSSLSAS | VFIFPPS |
| | SLRLSCAA | WNSGALTSGVHTFPAVLQSS | ID NO: | LQMILNGINN | VGDRVTI | DEQLKSG |
| | SGFTESDE | GLYSLSSVVTVPSSSLGTQT | 23) | YKNPKLTRML | TCRASQS | TASVVCL |
| | WMHWVRQA | YICNVNHKPSNTKVDKKVEP | | TFKFYMPKKA | VSRSLGW | LNNFYPR |
| | PGKGLEWI | KSCDKTHTCPPCPAPEAAGA | | TELKHLQCLE | YQQKPGK | EAKVQWK |
| | SYISGDSG | PSVFLFPPKPKDTLMISRTP | | EELKPLEEAL | APKLLIY | VDNALQS |
| | YTNYADSV | EVTCVVVDVSHEDPEVKENW | | NLAPSKNFHL | AASSLQS | GNSQESV |
| | KGRFTISR | YVDGVEVHNAKTKPREEQYN | | RPRDLISDIN | GVPSRES | TEQDSKD |
| | DNSKNTLY | STYRVVSVLTVLHQDWLNGK | | VIVLELKGSE | GSGSGTD | STYSLSS |
| | LQMNSLRA | EYKCKVSNKALPAPIEKTIS | | TTEMCEYADE | FTLTISS | TLTLSKA |
| | EDTAVYYC | KAKGQPREPQVYTLPPSREE | | TATIVEFINR | LQPEDFA | DYEKHKV |
| | ARDRPYYY | MTKNQVSLTCLVKGFYPSDI | | WITFSQSIIS | TYYCQQY | YACEVTH |
| | YMDVWGKG | AVEWESNGQPENNYKTTPPV | | TLT (SEQ | KSYPVTF | QGLSSPV |
| | TTVTVSS | LDSDGSFFLYSKLTVDKSRW | | ID NO: 41) | GQGTKVE | TKSENRG |
| | (SEQ ID | QQGNVFSCSVMHEALHNHYT | | | IK (SEQ | EC (SEQ |
| | NO: 591) | QKSLSLSPG (SEQ ID | | | ID NO: | ID NO: |
| | | NO: 44) | | | 1380) | 45) |
| MIAB | EVQLLESG | ASTKGPSVFPLAPSSKSTSG | GGGGS | APTSSSTKKT | DIQMTQS | RTVAAPS |
| 163 | GGLVQPGG | GTAALGCLVKDYFPEPVTVS | (SEQ | QLQLEHLLLD | PSSLSAS | VFIFPPS |
| | SLRLSCAA | WNSGALTSGVHTFPAVLQSS | ID NO: | LQMILNGINN | VGDRVTI | DEQLKSG |
| | SGFTFSDF | GLYSLSSVVTVPSSSLGTQT | 23) | YKNPKLTRML | TCRASQS | TASVVCL |
| | WMHWVRQA | YICNVNHKPSNTKVDKKVEP | | TFKFYMPKKA | VSRSLDW | LNNFYPR |
| | PGKGLEWI | KSCDKTHTCPPCPAPEAAGA | | TELKHLQCLE | YQQKPGK | EAKVQWK |
| | SYISGDSG | PSVFLFPPKPKDTLMISRTP | | EELKPLEEAL | APKLLIY | VDNALQS |
| | YTNYADSV | EVTCVVVDVSHEDPEVKENW | | NLAPSKNFHL | AASSLQS | GNSQESV |
| | KGRFTISR | YVDGVEVHNAKTKPREEQYN | | RPRDLISDIN | GVPSRES | TEQDSKD |
| | DNSKNTLY | STYRVVSVLTVLHQDWLNGK | | VIVLELKGSE | GSGSGTD | STYSLSS |
| | LQMNSLRA | EYKCKVSNKALPAPIEKTIS | | TTEMCEYADE | FTLTISS | TLTLSKA |
| | EDTAVYYC | KAKGQPREPQVYTLPPSREE | | TATIVEFINR | LQPEDFA | DYEKHKV |
| | ARDRPYYY | MTKNQVSLTCLVKGFYPSDI | | WITFSQSIIS | TYYCQQY | YACEVTH |
| | YMDVWGKG | AVEWESNGQPENNYKTTPPV | | TLT (SEQ | KSYPVTF | QGLSSPV |
| | TTVTVSS | LDSDGSFFLYSKLTVDKSRW | | ID NO: 41) | GQGTKVE | TKSENRG |
| | (SEQ ID | QQGNVFSCSVMHEALHNHYT | | | IK (SEQ | EC (SEQ |
| | NO: 591) | QKSLSLSPG (SEQ ID | | | ID NO: | ID NO: |
| | | NO: 44) | | | 1381) | 45) |
| MIAB | EVQLLESG | ASTKGPSVFPLAPSSKSTSG | GGGGS | APTSSSTKKT | DIQMTQS | RTVAAPS |
| 164 | GGLVQPGG | GTAALGCLVKDYFPEPVTVS | (SEQ | QLQLEHLLLD | PSSLSAS | VFIFPPS |
| | SLRLSCAA | WNSGALTSGVHTFPAVLQSS | ID NO: | LQMILNGINN | VGDRVTI | DEQLKSG |
| | SGFTESDE | GLYSLSSVVTVPSSSLGTQT | 23) | YKNPKLTRML | TCRASQS | TASVVCL |
| | WMHWVRQA | YICNVNHKPSNTKVDKKVEP | | TFKFYMPKKA | VSRSLTW | LNNFYPR |
| | PGKGLEWI | KSCDKTHTCPPCPAPEAAGA | | TELKHLQCLE | YQQKPGK | EAKVQWK |
| | SYISGDSG | PSVFLFPPKPKDTLMISRTP | | EELKPLEEAL | APKLLIY | VDNALQS |
| | YTNYADSV | EVTCVVVDVSHEDPEVKENW | | NLAPSKNEHL | AASSLQS | GNSQESV |
| | KGRFTISR | YVDGVEVHNAKTKPREEQYN | | RPRDLISDIN | GVPSRES | TEQDSKD |
| | DNSKNTLY | STYRVVSVLTVLHQDWLNGK | | VIVLELKGSE | GSGSGTD | STYSLSS |
| | LQMNSLRA | EYKCKVSNKALPAPIEKTIS | | TTEMCEYADE | FTLTISS | TLTLSKA |
| | EDTAVYYC | KAKGQPREPQVYTLPPSREE | | TATIVEFINR | LQPEDFA | DYEKHKV |
| | ARDRPYYY | MTKNQVSLTCLVKGFYPSDI | | WITESQSIIS | TYYCQQY | YACEVTH |
| | YMDVWGKG | AVEWESNGQPENNYKTTPPV | | TLT (SEQ | KSYPVTF | QGLSSPV |
| | TTVTVSS | LDSDGSFFLYSKLTVDKSRW | | ID NO: 41) | GQGTKVE | TKSFNRG |
| | SEQ ID | QQGNVFSCSVMHEALHNHYT | | | IK (SEQ | EC (SEQ |
| | NO: 591) | QKSLSLSPG (SEQ ID | | | ID NO: | ID NO: |
| | | NO: 44) | | | 1382) | 45) |
| MIAB | EVQLLESG | ASTKGPSVFPLAPSSKSTSG | GGGGS | APTSSSTKKT | DIQMTQS | RTVAAPS |
| 165 | GGLVQPGG | GTAALGCLVKDYFPEPVTVS | (SEQ | QLQLEHLLLD | PSSLSAS | VFIFPPS |
| | SLRLSCAA | WNSGALTSGVHTFPAVLQSS | ID NO: | LQMILNGINN | VGDRVTI | DEQLKSG |
| | SGFTESDE | GLYSLSSVVTVPSSSLGTQT | 23) | YKNPKLTRML | TCRASQS | TASVVCL |
| | WMHWVRQA | YICNVNHKPSNTKVDKKVEP | | TFKFYMPKKA | VSRSLSW | LNNFYPR |
| | PGKGLEWI | KSCDKTHTCPPCPAPEAAGA | | TELKHLQCLE | YQQKPGK | EAKVQWK |
| | SYISGDSG | PSVFLFPPKPKDTLMISRTP | | EELKPLEEAL | APKLLIY | VDNALQS |
| | YTNYADSV | EVTCVVVDVSHEDPEVKENW | | NLAPSKNFHL | AASSLQS | GNSQESV |
| | KGRFTISR | YVDGVEVHNAKTKPREEQYN | | RPRDLISDIN | GVPSRES | TEQDSKD |
| | DNSKNTLY | STYRVVSVLTVLHQDWLNGK | | VIVLELKGSE | GSGSGTD | STYSLSS |
| | LQMNSLRA | EYKCKVSNKALPAPIEKTIS | | TTEMCEYADE | FTLTISS | TLTLSKA |
| | EDTAVYYC | KAKGQPREPQVYTLPPSREE | | TATIVEFINR | LQPEDFA | DYEKHKV |
| | ARDRPYYY | MTKNQVSLTCLVKGFYPSDI | | WITFSQSIIS | TYYCQQY | YACEVTH |
| | YMDVWGKG | AVEWESNGQPENNYKTTPPV | | TLT (SEQ | KSYPVTF | QGLSSPV |
| | TTVTVSS | LDSDGSFFLYSKLTVDKSRW | | ID NO: 41) | GQGTKVE | TKSENRG |
| | (SEQ ID | QQGNVFSCSVMHEALHNHYT | | | IK (SEQ | EC (SEQ |
| | NO: 591) | QKSLSLSPG (SEQ ID | | | ID NO: | ID NO: |
| | | NO: 44) | | | 1383) | 45) |
| MIAB | EVQLLESG | ASTKGPSVFPLAPSSKSTSG | GGGGS | APTSSSTKKT | DIQMTQS | RTVAAPS |
| 166 | GGLVQPGG | GTAALGCLVKDYFPEPVTVS | (SEQ | QLQLEHLLLD | PSSLSAS | VFIFPPS |
| | SLRLSCAA | WNSGALTSGVHTFPAVLQSS | ID NO: | LQMILNGINN | VGDRVTI | DEQLKSG |
| | SGFTFSDE | GLYSLSSVVTVPSSSLGTQT | 23) | YKNPKLTRML | TCRASQS | TASVVCL |
| | WMHWVRQA | YICNVNHKPSNTKVDKKVEP | | TFKFYMPKKA | VSRSLEW | LNNFYPR |
| | PGKGLEWI | KSCDKTHTCPPCPAPEAAGA | | TELKHLQCLE | YQQKPGK | EAKVQWK |
| | SYISGDSG | PSVFLFPPKPKDTLMISRTP | | EELKPLEEAL | APKLLIY | VDNALQS |
| | YTNYADSV | EVTCVVVDVSHEDPEVKENW | | NLAPSKNFHL | AASSLQS | GNSQESV |
| | KGRFTISR | YVDGVEVHNAKTKPREEQYN | | RPRDLISDIN | GVPSRES | TEQDSKD |
| | DNSKNTLY | STYRVVSVLTVLHQDWLNGK | | VIVLELKGSE | GSGSGTD | STYSLSS |
| | LQMNSLRA | EYKCKVSNKALPAPIEKTIS | | TTEMCEYADE | FTLTISS | TLTLSKA |
| | EDTAVYYC | KAKGQPREPQVYTLPPSREE | | TATIVEFINR | LQPEDFA | DYEKHKV |
| | ARDRPYYY | MTKNQVSLTCLVKGFYPSDI | | WITFSQSIIS | TYYCQQY | YACEVTH |
| | YMDVWGKG | AVEWESNGQPENNYKTTPPV | | TLT (SEQ | KSYPVTF | QGLSSPV |
| | TTVTVSS | LDSDGSFFLYSKLTVDKSRW | | ID NO: 41) | GQGTKVE | TKSENRG |
| | (SEQ ID | QQGNVFSCSVMHEALHNHYT | | | IK (SEQ | EC (SEQ |
| | NO: 591) | QKSLSLSPG (SEQ ID | | | ID NO: | ID NO: |
| | | NO: 44) | | | 1384) | 45) |
| MIAB | EVQLLESG | ASTKGPSVFPLAPSSKSTSG | GGGGS | APTSSSTKKT | DIQMTQS | RTVAAPS |
| 167 | GGLVQPGG | GTAALGCLVKDYFPEPVTVS | (SEQ | QLQLEHLLLD | PSSLSAS | VFIFPPS |
| | SLRLSCAA | WNSGALTSGVHTFPAVLQSS | ID NO: | LQMILNGINN | VGDRVTI | DEQLKSG |
| | SGFTESDE | GLYSLSSVVTVPSSSLGTQT | 23) | YKNPKLTRML | TCRASQS | TASVVCL |
| | WMHWVRQA | YICNVNHKPSNTKVDKKVEP | | TFKFYMPKKA | VSRSLKW | LNNFYPR |
| | PGKGLEWI | KSCDKTHTCPPCPAPEAAGA | | TELKHLQCLE | YQQKPGK | EAKVQWK |
| | SYISGDSG | PSVFLFPPKPKDTLMISRTP | | EELKPLEEAL | APKLLIY | VDNALQS |
| | YTNYADSV | EVTCVVVDVSHEDPEVKENW | | NLAPSKNEHL | AASSLQS | GNSQESV |
| | KGRFTISR | YVDGVEVHNAKTKPREEQYN | | RPRDLISDIN | GVPSRES | TEQDSKD |
| | DNSKNTLY | STYRVVSVLTVLHQDWLNGK | | VIVLELKGSE | GSGSGTD | STYSLSS |
| | LQMNSLRA | EYKCKVSNKALPAPIEKTIS | | TTEMCEYADE | FTLTISS | TLTLSKA |
| | EDTAVYYC | KAKGQPREPQVYTLPPSREE | | TATIVEFINR | LQPEDFA | DYEKHKV |
| | ARDRPYYY | MTKNQVSLTCLVKGFYPSDI | | WITFSQSIIS | TYYCQQY | YACEVTH |
| | YMDVWGKG | AVEWESNGQPENNYKTTPPV | | TLT (SEQ | KSYPVTF | QGLSSPV |
| | TTVTVSS | LDSDGSFFLYSKLTVDKSRW | | ID NO: 41) | GQGTKVE | TKSFNRG |
| | (SEQ ID | QQGNVFSCSVMHEALHNHYT | | | IK (SEQ | EC (SEQ |
| | NO: 591) | QKSLSLSPG (SEQ ID | | | ID NO: | ID NO: |
| | | NO: 44) | | | 1385) | 45) |
| MIAB | EVQLLESG | ASTKGPSVFPLAPSSKSTSG | GGGGS | APTSSSTKKT | DIQMTQS | RTVAAPS |
| 168 | GGLVQPGG | GTAALGCLVKDYFPEPVTVS | (SEQ | QLQLEHLLLD | PSSLSAS | VFIFPPS |
| | SLRLSCAA | WNSGALTSGVHTFPAVLQSS | ID NO: | LQMILNGINN | VGDRVTI | DEQLKSG |
| | SGFTESDE | GLYSLSSVVTVPSSSLGTQT | 23) | YKNPKLTRML | TCRASQS | TASVVCL |
| | WMHWVRQA | YICNVNHKPSNTKVDKKVEP | | TFKFYMPKKA | VSRSLLW | LNNFYPR |
| | PGKGLEWI | KSCDKTHTCPPCPAPEAAGA | | TELKHLQCLE | YQQKPGK | EAKVQWK |
| | SYISGDSG | PSVFLFPPKPKDTLMISRTP | | EELKPLEEAL | APKLLIY | VDNALQS |
| | YTNYADSV | EVTCVVVDVSHEDPEVKENW | | NLAPSKNFHL | AASSLQS | GNSQESV |
| | KGRFTISR | YVDGVEVHNAKTKPREEQYN | | RPRDLISDIN | GVPSRES | TEQDSKD |
| | DNSKNTLY | STYRVVSVLTVLHQDWLNGK | | VIVLELKGSE | GSGSGTD | STYSLSS |
| | LQMNSLRA | EYKCKVSNKALPAPIEKTIS | | TTEMCEYADE | FTLTISS | TLTLSKA |
| | EDTAVYYC | KAKGQPREPQVYTLPPSREE | | TATIVEFINR | LQPEDFA | DYEKHKV |
| | ARDRPYYY | MTKNQVSLTCLVKGFYPSDI | | WITFSQSIIS | TYYCQQY | YACEVTH |
| | YMDVWGKG | AVEWESNGQPENNYKTTPPV | | TLT (SEQ | KSYPVTF | QGLSSPV |
| | TTVTVSS | LDSDGSFFLYSKLTVDKSRW | | ID NO: 41) | GQGTKVE | TKSENRG |
| | (SEQ ID | QQGNVFSCSVMHEALHNHYT | | | IK (SEQ | EC (SEQ |
| | NO: 591) | QKSLSLSPG (SEQ ID | | | ID NO: | ID NO: |
| | | NO: 44) | | | 1386) | 45) |
| MIAB | EVQLLESG | ASTKGPSVFPLAPSSKSTSG | GGGGS | APTSSSTKKT | DIQMTQS | RTVAAPS |
| 169 | GGLVQPGG | GTAALGCLVKDYFPEPVTVS | (SEQ | QLQLEHLLLD | PSSLSAS | VFIFPPS |
| | SLRLSCAA | WNSGALTSGVHTFPAVLQSS | ID NO: | LQMILNGINN | VGDRVTI | DEQLKSG |
| | SGFTESDE | GLYSLSSVVTVPSSSLGTQT | 23) | YKNPKLTRML | TCRASQS | TASVVCL |
| | WMHWVRQA | YICNVNHKPSNTKVDKKVEP | | TFKFYMPKKA | VSRSLAW | LNNFYPR |
| | PGKGLEWI | KSCDKTHTCPPCPAPEAAGA | | TELKHLQCLE | YQQKPGK | EAKVQWK |
| | SYISGDSG | PSVFLFPPKPKDTLMISRTP | | EELKPLEEAL | APKLLIY | VDNALQS |
| | YTNYADSV | EVTCVVVDVSHEDPEVKENW | | NLAPSKNFHL | AASSLQS | GNSQESV |
| | KGRFTISR | YVDGVEVHNAKTKPREEQYN | | RPRDLISDIN | GVPSRES | TEQDSKD |
| | DNSKNTLY | STYRVVSVLTVLHQDWLNGK | | VIVLELKGSE | GSGSGTD | STYSLSS |
| | LQMNSLRA | EYKCKVSNKALPAPIEKTIS | | TTFMCEYADE | FTLTISS | TLTLSKA |
| | EDTAVYYC | KAKGQPREPQVYTLPPSREE | | TATIVEFINR | LQPEDFA | DYEKHKV |
| | ARDRPYYY | MTKNQVSLTCLVKGFYPSDI | | WITESQSIIS | TYYCQQY | YACEVTH |
| | IMDVWGKG | AVEWESNGQPENNYKTTPPV | | TLT (SEQ | KSYPVTF | QGLSSPV |
| | TTVTVSS | LDSDGSFFLYSKLTVDKSRW | | ID NO: 41) | GQGTKVE | TKSENRG |
| | (SEQ ID | QQGNVFSCSVMHEALHNHYT | | | IK (SEQ | EC (SEQ |
| | NO: | QKSLSLSPG (SEQ ID | | | ID NO: | ID NO: |
| | 1387) | NO: 44) | | | 592) | 45) |
| MIAB | EVQLLESG | ASTKGPSVFPLAPSSKSTSG | GGGGS | APTSSSTKKT | DIQMTQS | RTVAAPS |
| 170 | GGLVQPGG | GTAALGCLVKDYFPEPVTVS | (SEQ | QLQLEHLLLD | PSSLSAS | VFIFPPS |
| | SLRLSCAA | WNSGALTSGVHTFPAVLQSS | ID NO: | LQMILNGINN | VGDRVTI | DEQLKSG |
| | SGFTESDE | GLYSLSSVVTVPSSSLGTQT | 23) | YKNPKLTRML | TCRASQS | TASVVCL |
| | WMHWVRQA | YICNVNHKPSNTKVDKKVEP | | TFKFYMPKKA | VSRSLAW | LNNFYPR |
| | PGKGLEWI | KSCDKTHTCPPCPAPEAAGA | | TELKHLQCLE | YQQKPGK | EAKVQWK |
| | SYISGDSG | PSVFLFPPKPKDTLMISRTP | | EELKPLEEAL | APKLLIY | VDNALQS |
| | YTNYADSV | EVTCVVVDVSHEDPEVKENW | | NLAPSKNFHL | AASSLQS | GNSQESV |
| | KGRFTISR | YVDGVEVHNAKTKPREEQYN | | RPRDLISDIN | GVPSRES | TEQDSKD |
| | DNSKNTLY | STYRVVSVLTVLHQDWLNGK | | VIVLELKGSE | GSGSGTD | STYSLSS |
| | LQMNSLRA | EYKCKVSNKALPAPIEKTIS | | TTEMCEYADE | FTLTISS | TLTLSKA |
| | EDTAVYYC | KAKGQPREPQVYTLPPSREE | | TATIVEFINR | LQPEDFA | DYEKHKV |
| | ARDRPYYY | MTKNQVSLTCLVKGFYPSDI | | WITFSQSIIS | TYYCQQY | YACEVTH |
| | WMDVWGKG | AVEWESNGQPENNYKTTPPV | | TLT (SEQ | KSYPVTF | QGLSSPV |
| | TTVTVSS | LDSDGSFFLYSKLTVDKSRW | | ID NO: 41) | GQGTKVE | TKSENRG |
| | (SEQ ID | QQGNVFSCSVMHEALHNHYT | | | IK (SEQ | EC (SEQ |
| | NO: | QKSLSLSPG (SEQ ID | | | ID NO: | ID NO: |
| | 1388) | NO: 44) | | | 592) | 45) |
| MIAB | EVQLLESG | ASTKGPSVFPLAPSSKSTSG | GGGGS | APTSSSTKKT | DIQMTQS | RTVAAPS |
| 171 | GGLVQPGG | GTAALGCLVKDYFPEPVTVS | SEQ | QLQLEHLLLD | PSSLSAS | VFIFPPS |
| | SLRLSCAA | WNSGALTSGVHTFPAVLQSS | ID NO: | LQMILNGINN | VGDRVTI | DEQLKSG |
| | SGFTESDE | GLYSLSSVVTVPSSSLGTQT | 23) | YKNPKLTRML | TCRASQS | TASVVCL |
| | WMHWVRQA | YICNVNHKPSNTKVDKKVEP | | TFKFYMPKKA | VSRSLAW | LNNFYPR |
| | PGKGLEWI | KSCDKTHTCPPCPAPEAAGA | | TELKHLQCLE | YQQKPGK | EAKVQWK |
| | SYISGDSG | PSVFLFPPKPKDTLMISRTP | | EELKPLEEAL | APKLLIY | VDNALQS |
| | YTNYADSV | EVTCVVVDVSHEDPEVKENW | | NLAPSKNFHL | AASSLQS | GNSQESV |
| | KGRFTISR | YVDGVEVHNAKTKPREEQYN | | RPRDLISDIN | GVPSRFS | TEQDSKD |
| | DNSKNTLY | STYRVVSVLTVLHQDWLNGK | | VIVLELKGSE | GSGSGTD | STYSLSS |
| | LQMNSLRA | EYKCKVSNKALPAPIEKTIS | | TTFMCEYADE | FTLTISS | TLTLSKA |
| | EDTAVYYC | KAKGQPREPQVYTLPPSREE | | TATIVEFINR | LQPEDFA | DYEKHKV |
| | ARDRPSYY | MTKNQVSLTCLVKGFYPSDI | | WITESQSIIS | TYYCQQY | YACEVTH |
| | YMDVWGKG | AVEWESNGQPENNYKTTPPV | | TLT (SEQ | KSYPVTF | QGLSSPV |
| | TTVTVSS | LDSDGSFFLYSKLTVDKSRW | | ID NO: 41) | GQGTKVE | TKSFNRG |
| | (SEQ ID | QQGNVFSCSVMHEALHNHYT | | | IK (SEQ | EC (SEQ |
| | NO: | QKSLSLSPG (SEQ ID | | | ID NO: | ID NO: |
| | 1389) | NO: 44) | | | 592) | 45) |
| MIAB | EVQLLESG | ASTKGPSVFPLAPSSKSTSG | GGGGS | APTSSSTKKT | DIQMTQS | RTVAAPS |
| 172 | GGLVQPGG | GTAALGCLVKDYFPEPVTVS | (SEQ | QLQLEHLLLD | PSSLSAS | VFIFPPS |
| | SLRLSCAA | WNSGALTSGVHTFPAVLQSS | ID NO: | LQMILNGINN | VGDRVTI | DEQLKSG |
| | SGFTESDE | GLYSLSSVVTVPSSSLGTQT | 23) | YKNPKLTRML | TCRASQS | TASVVCL |
| | WMHWVRQA | YICNVNHKPSNTKVDKKVEP | | TFKFYMPKKA | VSRSLAW | LNNFYPR |
| | PGKGLEWI | KSCDKTHTCPPCPAPEAAGA | | TELKHLQCLE | YQQKPGK | EAKVQWK |
| | SYISGDSG | PSVFLFPPKPKDTLMISRTP | | EELKPLEEAL | APKLLIY | VDNALQS |
| | YTNYADSV | EVTCVVVDVSHEDPEVKENW | | NLAPSKNFHL | AASSLQS | GNSQESV |
| | KGRFTISR | YVDGVEVHNAKTKPREEQYN | | RPRDLISDIN | GVPSRES | TEQDSKD |
| | DNSKNTLY | STYRVVSVLTVLHQDWLNGK | | VIVLELKGSE | GSGSGTD | STYSLSS |
| | LQMNSLRA | EYKCKVSNKALPAPIEKTIS | | TTEMCEYADE | FTLTISS | TLTLSKA |
| | EDTAVYYC | KAKGQPREPQVYTLPPSREE | | TATIVEFINR | LQPEDFA | DYEKHKV |
| | ARDRPTYY | MTKNQVSLTCLVKGFYPSDI | | WITFSQSIIS | TYYCQQY | YACEVTH |
| | YMDVWGKG | AVEWESNGQPENNYKTTPPV | | TLT (SEQ | KSYPVTF | QGLSSPV |
| | TTVTVSS | LDSDGSFFLYSKLTVDKSRW | | ID NO: 41) | GQGTKVE | TKSENRG |
| | (SEQ ID | QQGNVFSCSVMHEALHNHYT | | | IK (SEQ | EC (SEQ |
| | NO: | QKSLSLSPG (SEQ ID | | | ID NO: | ID NO: |
| | 1390) | NO: 44) | | | 592) | 45) |
| MIAB | EVQLLESG | ASTKGPSVFPLAPSSKSTSG | GGGGS | APTSSSTKKT | DIQMTQS | RTVAAPS |
| 173 | GGLVQPGG | GTAALGCLVKDYFPEPVTVS | (SEQ | QLQLEHLLLD | PSSLSAS | VFIFPPS |
| | SLRLSCAA | WNSGALTSGVHTFPAVLQSS | ID NO: | LQMILNGINN | VGDRVTI | DEQLKSG |
| | SGFTFSDF | GLYSLSSVVTVPSSSLGTQT | 23) | YKNPKLTRML | TCRASQS | TASVVCL |
| | WMHWVRQA | YICNVNHKPSNTKVDKKVEP | | TFKFYMPKKA | VSRSLAW | LNNFYPR |
| | PGKGLEWI | KSCDKTHTCPPCPAPEAAGA | | TELKHLQCLE | YQQKPGK | EAKVQWK |
| | SYISGDSG | PSVFLFPPKPKDTLMISRTP | | EELKPLEEAL | APKLLIY | VDNALQS |
| | YTNYADSV | EVTCVVVDVSHEDPEVKENW | | NLAPSKNFHL | AASSLQS | GNSQESV |
| | KGRFTISR | YVDGVEVHNAKTKPREEQYN | | RPRDLISDIN | GVPSRES | TEQDSKD |
| | DNSKNTLY | STYRVVSVLTVLHQDWLNGK | | VIVLELKGSE | GSGSGTD | STYSLSS |
| | LQMNSLRA | EYKCKVSNKALPAPIEKTIS | | TTFMCEYADE | FTLTISS | TLTLSKA |
| | EDTAVYYC | KAKGQPREPQVYTLPPSREE | | TATIVEFINR | LQPEDFA | DYEKHKV |
| | ARDRPYYY | MTKNQVSLTCLVKGFYPSDI | | WITFSQSIIS | TYYCQQY | YACEVTH |
| | YMDVWGKG | AVEWESNGQPENNYKTTPPV | | TLT (SEQ | KSYPVTF | QGLSSPV |
| | TTVTVSS | LDSDGSFFLYSKLTVDKSRW | | ID NO: 41) | GQGTKVE | TKSENRG |
| | (SEQ ID | QQGNVFSCSVMHEALHNHYT | | | IK (SEQ | EC (SEQ |
| | NO: 591) | QKSLSLSPG (SEQ ID | | | ID NO: | ID NO: |
| | | NO: 44) | | | 592) | 45) |
| MIAB | EVQLLESG | ASTKGPSVFPLAPSSKSTSG | GGGGS | APTSSSTKKT | DIQMTQS | RTVAAPS |
| 174 | GGLVQPGG | GTAALGCLVKDYFPEPVTVS | SEQ | QLQLEHLLLD | PSSLSAS | VFIFPPS |
| | SLRLSCAA | WNSGALTSGVHTFPAVLQSS | ID NO: | LQMILNGINN | VGDRVTI | DEQLKSG |
| | SGFTESDY | GLYSLSSVVTVPSSSLGTQT | 23) | YKNPKLTRML | TCRASQS | TASVVCL |
| | WMHWVRQA | YICNVNHKPSNTKVDKKVEP | | TFKFYMPKKA | VSRSLAW | LNNFYPR |
| | PGKGLEWI | KSCDKTHTCPPCPAPEAAGA | | TELKHLQCLE | YQQKPGK | EAKVQWK |
| | SYISGDSG | PSVFLFPPKPKDTLMISRTP | | EELKPLEEAL | APKLLIY | VDNALQS |
| | YTNYADSV | EVTCVVVDVSHEDPEVKENW | | NLAPSKNFHL | AASSLQS | GNSQESV |
| | KGRFTISR | YVDGVEVHNAKTKPREEQYN | | RPRDLISDIN | GVPSRES | TEQDSKD |
| | DNSKNTLY | STYRVVSVLTVLHQDWLNGK | | VIVLELKGSE | GSGSGTD | STYSLSS |
| | LQMNSLRA | EYKCKVSNKALPAPIEKTIS | | TTFMCEYADE | FTLTISS | TLTLSKA |
| | EDTAVYYC | KAKGQPREPQVYTLPPSREE | | TATIVEFINR | LQPEDFA | DYEKHKV |
| | ARDRPYYY | MTKNQVSLTCLVKGFYPSDI | | WITFSQSIIS | TYYCQQY | YACEVTH |
| | YMDVWGKG | AVEWESNGQPENNYKTTPPV | | TLT (SEQ | KSYPVTF | QGLSSPV |
| | TTVTVSS | LDSDGSFFLYSKLTVDKSRW | | ID NO: 41) | GQGTKVE | TKSENRG |
| | (SEQ ID | QQGNVFSCSVMHEALHNHYT | | | IK (SEQ | EC (SEQ |
| | NO: | QKSLSLSPG (SEQ ID | | | ID NO: | ID NO: |
| | 1391) | NO: 44) | | | 592) | 45) |
| MIAB | EVQLLESG | ASTKGPSVFPLAPSSKSTSG | GGGGS | APTSSSTKKT | DIQMTQS | RTVAAPS |
| 175 | GGLVQPGG | GTAALGCLVKDYFPEPVTVS | (SEQ | QLQLEHLLLD | PSSLSAS | VFIFPPS |
| | SLRLSCAA | WNSGALTSGVHTFPAVLQSS | ID NO: | LQMILNGINN | VGDRVTI | DEQLKSG |
| | SGFTESSY | GLYSLSSVVTVPSSSLGTQT | 23) | YKNPKLTRML | TCRASQS | TASVVCL |
| | WMHWVRQA | YICNVNHKPSNTKVDKKVEP | | TFKFYMPKKA | VSRSLAW | LNNFYPR |
| | PGKGLEWI | KSCDKTHTCPPCPAPEAAGA | | TELKHLQCLE | YQQKPGK | EAKVQWK |
| | SYISGDSG | PSVFLFPPKPKDTLMISRTP | | EELKPLEEAL | APKLLIY | VDNALQS |
| | YTNYADSV | EVTCVVVDVSHEDPEVKENW | | NLAPSKNFHL | AASSLQS | GNSQESV |
| | KGRFTISR | YVDGVEVHNAKTKPREEQYN | | RPRDLISDIN | GVPSRFS | TEQDSKD |
| | DNSKNTLY | STYRVVSVLTVLHQDWLNGK | | VIVLELKGSE | GSGSGTD | STYSLSS |
| | LQMNSLRA | EYKCKVSNKALPAPIEKTIS | | TTFMCEYADE | FTLTISS | TLTLSKA |
| | EDTAVYYC | KAKGQPREPQVYTLPPSREE | | TATIVEFINR | LQPEDFA | DYEKHKV |
| | ARDRPYYY | MTKNQVSLTCLVKGFYPSDI | | WITFSQSIIS | TYYCQQY | YACEVTH |
| | YMDVWGKG | AVEWESNGQPENNYKTTPPV | | TLT (SEQ | KSYPVTF | QGLSSPV |
| | TTVTVSS | LDSDGSFFLYSKLTVDKSRW | | ID NO: 41) | GQGTKVE | TKSENRG |
| | (SEQ ID | QQGNVFSCSVMHEALHNHYT | | | IK (SEQ | EC (SEQ |
| | NO: | QKSLSLSPG (SEQ ID | | | ID NO: | ID NO: |
| | 1392) | NO: 44) | | | 592) | 45) |
| MIAB | EVQLLESG | ASTKGPSVFPLAPSSKSTSG | GGGGS | APTSSSTKKT | DIQMTQS | RTVAAPS |
| 176 | GGLVQPGG | GTAALGCLVKDYFPEPVTVS | (SEQ | QLQLEHLLLD | PSSLSAS | VFIFPPS |
| | SLRLSCAA | WNSGALTSGVHTFPAVLQSS | ID NO: | LQMILNGINN | VGDRVTI | DEQLKSG |
| | SGFTESDE | GLYSLSSVVTVPSSSLGTQT | 23) | YKNPKLTRML | TCRASQS | TASVVCL |
| | WMHWVRQA | YICNVNHKPSNTKVDKKVEP | | TFKFYMPKKA | VSRSLAW | LNNFYPR |
| | PGKGLEWI | KSCDKTHTCPPCPAPEAAGA | | TELKHLQCLE | YQQKPGK | EAKVQWK |
| | SAISGSSG | PSVFLFPPKPKDTLMISRTP | | EELKPLEEAL | APKLLIY | VDNALQS |
| | STYYADSV | EVTCVVVDVSHEDPEVKENW | | NLAPSKNEHL | AASSLQS | GNSQESV |
| | KGRFTISR | YVDGVEVHNAKTKPREEQYN | | RPRDLISDIN | GVPSRES | TEQDSKD |
| | DNSKNTLY | STYRVVSVLTVLHQDWLNGK | | VIVLELKGSE | GSGSGTD | STYSLSS |
| | LQMNSLRA | EYKCKVSNKALPAPIEKTIS | | TTFMCEYADE | FTLTISS | TLTLSKA |
| | EDTAVYYC | KAKGQPREPQVYTLPPSREE | | TATIVEFINR | LQPEDFA | DYEKHKV |
| | ARDRPYYY | MTKNQVSLTCLVKGFYPSDI | | WITFSQSIIS | TYYCQQY | YACEVTH |
| | YMDVWGKG | AVEWESNGQPENNYKTTPPV | | TLT (SEQ | KSYPVTF | QGLSSPV |
| | TTVTVSS | LDSDGSFFLYSKLTVDKSRW | | ID NO: 41) | GQGTKVE | TKSENRG |
| | (SEQ ID | QQGNVFSCSVMHEALHNHYT | | | IK (SEQ | EC (SEQ |
| | NO: | QKSLSLSPG (SEQ ID | | | ID NO: | ID NO: |
| | 1393) | NO: 44) | | | 592) | 45) |
| MIAB | EVQLLESG | ASTKGPSVFPLAPSSKSTSG | GGGGS | APTSSSTKKT | DIQMTQS | RTVAAPS |
| 177 | GGLVQPGG | GTAALGCLVKDYFPEPVTVS | (SEQ | QLQLEHLLLD | PSSLSAS | VFIFPPS |
| | SLRLSCAA | WNSGALTSGVHTFPAVLQSS | ID NO: | LQMILNGINN | VGDRVTI | DEQLKSG |
| | SGFTESDE | GLYSLSSVVTVPSSSLGTQT | 23) | YKNPKLTRML | TCRASQS | TASVVCL |
| | WMHWVRQA | YICNVNHKPSNTKVDKKVEP | | TFKFYMPKKA | VSRSLAW | LNNFYPR |
| | PGKGLEWV | KSCDKTHTCPPCPAPEAAGA | | TELKHLQCLE | YQQKPGK | EAKVQWK |
| | SAISGSGG | PSVELFPPKPKDTLMISRTP | | EELKPLEEAL | APKLLIY | VDNALQS |
| | STYYADSV | EVTCVVVDVSHEDPEVKENW | | NLAPSKNEHL | AASSLQS | GNSQESV |
| | KGRFTISR | YVDGVEVHNAKTKPREEQYN | | RPRDLISDIN | GVPSRES | TEQDSKD |
| | DNSKNTLY | STYRVVSVLTVLHQDWLNGK | | VIVLELKGSE | GSGSGTD | STYSLSS |
| | LQMNSLRA | EYKCKVSNKALPAPIEKTIS | | TTFMCEYADE | FTLTISS | TLTLSKA |
| | EDTAVYYC | KAKGQPREPQVYTLPPSREE | | TATIVEFINR | LQPEDFA | DYEKHKV |
| | ARDRPYYY | MTKNQVSLTCLVKGFYPSDI | | WITFSQSIIS | TYYCQQY | YACEVTH |
| | YMDVWGKG | AVEWESNGQPENNYKTTPPV | | TLT (SEQ | KSYPVTF | QGLSSPV |
| | TTVTVSS | LDSDGSFFLYSKLTVDKSRW | | ID NO: 41) | GQGTKVE | TKSENRG |
| | (SEQ ID | QQGNVFSCSVMHEALHNHYT | | | IK (SEQ | EC (SEQ |
| | NO: | QKSLSLSPG (SEQ ID | | | ID NO: | ID NO: |
| | 1357) | NO: 44) | | | 592) | 45) |
| MIAB | EVQLLESG | ASTKGPSVFPLAPSSKSTSG | GGGGS | APTSSSTKKT | DIQMTQS | RTVAAPS |
| 178 | GGLVQPGG | GTAALGCLVKDYFPEPVTVS | (SEQ | QLQLEHLLLD | PSSLSAS | VFIFPPS |
| | SLRLSCAA | WNSGALTSGVHTFPAVLQSS | ID NO: | LQMILNGINN | VGDRVTI | DEQLKSG |
| | SGFTESSY | GLYSLSSVVTVPSSSLGTQT | 23) | YKNPKLTRML | TCRASQS | TASVVCL |
| | WMHWVRQA | YICNVNHKPSNTKVDKKVEP | | TFKFYMPKKA | VSRSLAW | LNNFYPR |
| | PGKGLEWI | KSCDKTHTCPPCPAPEAAGA | | TELKHLQCLE | YQQKPGK | EAKVQWK |
| | SAISGSSG | PSVFLFPPKPKDTLMISRTP | | EELKPLEEAL | APKLLIY | VDNALQS |
| | STYYADSV | EVTCVVVDVSHEDPEVKENW | | NLAPSKNFHL | AASSLQS | GNSQESV |
| | KGRFTISR | YVDGVEVHNAKTKPREEQYN | | RPRDLISDIN | GVPSRES | TEQDSKD |
| | DNSKNTLY | STYRVVSVLTVLHQDWLNGK | | VIVLELKGSE | GSGSGTD | STYSLSS |
| | LQMNSLRA | EYKCKVSNKALPAPIEKTIS | | TTFMCEYADE | FTLTISS | TLTLSKA |
| | EDTAVYYC | KAKGQPREPQVYTLPPSREE | | TATIVEFINR | LQPEDFA | DYEKHKV |
| | ARDRPYYY | MTKNQVSLTCLVKGFYPSDI | | WITESQSIIS | TYYCQQY | YACEVTH |
| | YMDVWGKG | AVEWESNGQPENNYKTTPPV | | TLT (SEQ | KSYPVTF | QGLSSPV |
| | TTVTVSS | LDSDGSFFLYSKLTVDKSRW | | ID NO: 41) | GQGTKVE | TKSENRG |
| | (SEQ ID | QQGNVFSCSVMHEALHNHYT | | | IK (SEQ | EC (SEQ |
| | NO: | QKSLSLSPG (SEQ ID | | | ID NO: | ID NO: |
| | 1394) | NO: 44) | | | 592) | 45) |
| MIAB | EVQLLESG | ASTKGPSVFPLAPSSKSTSG | GGGGS | APTSSSTKKT | DIQMTQS | RTVAAPS |
| 179 | GGLVQPGG | GTAALGCLVKDYFPEPVTVS | (SEQ | QLQLEHLLLD | PSSLSAS | VFIFPPS |
| | SLRLSCAA | WNSGALTSGVHTFPAVLQSS | ID NO: | LQMILNGINN | VGDRVTI | DEQLKSG |
| | SGFTESSY | GLYSLSSVVTVPSSSLGTQT | 23) | YKNPKLTRML | TCRASQS | TASVVCL |
| | WMHWVRQA | YICNVNHKPSNTKVDKKVEP | | TFKFYMPKKA | ISRYLAW | LNNFYPR |
| | PGKGLEWV | KSCDKTHTCPPCPAPEAAGA | | TELKHLQCLE | YQQKPGK | EAKVQWK |
| | SAISGSGG | PSVFLFPPKPKDTLMISRTP | | EELKPLEEAL | APKLLIY | VDNALQS |
| | STYYADSV | EVTCVVVDVSHEDPEVKENW | | NLAPSKNFHL | AASSLQS | GNSQESV |
| | KGRFTISR | YVDGVEVHNAKTKPREEQYN | | RPRDLISDIN | GVPSRES | TEQDSKD |
| | DNSKNTLY | STYRVVSVLTVLHQDWLNGK | | VIVLELKGSE | GSGSGTD | STYSLSS |
| | LQMNSLRA | EYKCKVSNKALPAPIEKTIS | | TTFMCEYADE | FTLTISS | TLTLSKA |
| | EDTAVYYC | KAKGQPREPQVYTLPPSREE | | TATIVEFINR | LQPEDEA | DYEKHKV |
| | ARDRPYYY | MTKNQVSLTCLVKGFYPSDI | | WITFSQSIIS | TYYCQQY | YACEVTH |
| | YMDVWGKG | AVEWESNGQPENNYKTTPPV | | TLT (SEQ | KSYPVTF | QGLSSPV |
| | TTVTVSS | LDSDGSFFLYSKLTVDKSRW | | ID NO: 41) | GQGTKVE | TKSENRG |
| | (SEQ ID | QQGNVFSCSVMHEALHNHYT | | | IK (SEQ | EC (SEQ |
| | NO: | QKSLSLSPG (SEQ ID | | | ID NO: | ID NO: |
| | 1395) | NO: 44) | | | 1368) | 45) |
| MIAB | EVQLLESG | ASTKGPSVFPLAPSSKSTSG | GGGGS | APTSSSTKKT | DIQMTQS | RTVAAPS |
| 180 | GGLVQPGG | GTAALGCLVKDYFPEPVTVS | (SEQ | QLQLEHLLLD | PSSLSAS | VFIFPPS |
| | SLRLSCAA | WNSGALTSGVHTFPAVLQSS | ID NO: | LQMILNGINN | VGDRVTI | DEQLKSG |
| | SGFTFSSY | GLYSLSSVVTVPSSSLGTQT | 23) | YKNPKLTRML | TCRASQS | TASVVCL |
| | WMHWVRQA | YICNVNHKPSNTKVDKKVEP | | TFKFYMPKKA | VSRSLAW | LNNFYPR |
| | PGKGLEWV | KSCDKTHTCPPCPAPEAAGA | | TELKHLQCLE | YQQKPGK | EAKVQWK |
| | SAISGSGG | PSVFLFPPKPKDTLMISRTP | | EELKPLEEAL | APKLLIY | VDNALQS |
| | STYYADSV | EVTCVVVDVSHEDPEVKENW | | NLAPSKNFHL | AASSLQS | GNSQESV |
| | KGRFTISR | YVDGVEVHNAKTKPREEQYN | | RPRDLISDIN | GVPSRES | TEQDSKD |
| | DNSKNTLY | STYRVVSVLTVLHQDWLNGK | | VIVLELKGSE | GSGSGTD | STYSLSS |
| | LQMNSLRA | EYKCKVSNKALPAPIEKTIS | | TTFMCEYADE | FTLTISS | TLTLSKA |
| | EDTAVYYC | KAKGQPREPQVYTLPPSREE | | TATIVEFINR | LQPEDFA | DYEKHKV |
| | ARDRPYYY | MTKNQVSLTCLVKGFYPSDI | | WITESQSIIS | TYYCQQY | YACEVTH |
| | YMDVWGKG | AVEWESNGQPENNYKTTPPV | | TLT (SEQ | KSYPVTF | QGLSSPV |
| | TTVTVSS | LDSDGSFFLYSKLTVDKSRW | | ID NO: 41) | GQGTKVE | TKSFNRG |
| | (SEQ ID | QQGNVFSCSVMHEALHNHYT | | | IK (SEQ | EC (SEQ |
| | NO: | QKSLSLSPG (SEQ ID | | | ID NO: | ID NO: |
| | 1395) | NO: 44) | | | 592) | 45) |
| MIAB | EVQLLESG | ASTKGPSVFPLAPSSKSTSG | GGGGS | APTSSSTKKT | DIQMTQS | RTVAAPS |
| 181 | GGLVQPGG | GTAALGCLVKDYFPEPVTVS | (SEQ | QLQLEHLLLD | PSSLSAS | VFIFPPS |
| | SLRLSCAA | WNSGALTSGVHTFPAVLQSS | ID NO: | LQMILNGINN | VGDRVTI | DEQLKSG |
| | SGFTESSY | GLYSLSSVVTVPSSSLGTQT | 23) | YKNPKLTRML | TCRASQS | TASVVCL |
| | WMHWVRQA | YICNVNHKPSNTKVDKKVEP | | TFKFYMPKKA | ISRYLAW | LNNFYPR |
| | PGKGLEWV | KSCDKTHTCPPCPAPEAAGA | | TELKHLQCLE | YQQKPGK | EAKVQWK |
| | SAISGSGG | PSVFLFPPKPKDTLMISRTP | | EELKPLEEAL | APKLLIY | VDNALQS |
| | STYYADSV | EVTCVVVDVSHEDPEVKENW | | NLAPSKNFHL | AASSLQS | GNSQESV |
| | KGRFTISR | YVDGVEVHNAKTKPREEQYN | | RPRDLISDIN | GVPSRES | TEQDSKD |
| | DNSKNTLY | STYRVVSVLTVLHQDWLNGK | | VIVLELKGSE | GSGSGTD | STYSLSS |
| | LQMNSLRA | EYKCKVSNKALPAPIEKTIS | | TTFMCEYADE | FTLTISS | TLTLSKA |
| | EDTAVYYC | KAKGQPREPQVYTLPPSREE | | TATIVEFINR | LQPEDFA | DYEKHKV |
| | ARDRPYYY | MTKNQVSLTCLVKGFYPSDI | | WITFSQSIIS | TYYCQQY | YACEVTH |
| | YMDVWGKG | AVEWESNGQPENNYKTTPPV | | TLT (SEQ | KSYPVTE | QGLSSPV |
| | TTVTVSS | LDSDGSFFLYSKLTVDKSRW | | ID NO: 41) | GQGTKVE | TKSENRG |
| | (SEQ ID | QQGNVESCSVMHEALHNHYT | | | IK (SEQ | EC (SEQ |
| | NO: | QKSLSLSPG (SEQ ID | | | ID NO: | ID NO: |
| | 1395) | NO: 44) | | | 1368) | 45) |
| MIAB | EVQLLESG | ASTKGPSVFPLAPSSKSTSG | GGGGS | APTSSSTKKT | DIQMTQS | RTVAAPS |
| 182 | GGLVQPGG | GTAALGCLVKDYFPEPVTVS | (SEQ | QLQLEHLLLD | PSSLSAS | VFIFPPS |
| | SLRLSCAA | WNSGALTSGVHTFPAVLQSS | ID NO: | LQMILNGINN | VGDRVTI | DEQLKSG |
| | SGFTESSY | GLYSLSSVVTVPSSSLGTQT | 23) | YKNPKLTRML | TCRASQS | TASVVCL |
| | WMHWVRQA | YICNVNHKPSNTKVDKKVEP | | TFKFYMPKKA | ISRSLAW | LNNFYPR |
| | PGKGLEWV | KSCDKTHTCPPCPAPEAAGA | | TELKHLQCLE | YQQKPGK | EAKVQWK |
| | SAISGSGG | PSVFLFPPKPKDTLMISRTP | | EELKPLEEAL | APKLLIY | VDNALQS |
| | STYYADSV | EVTCVVVDVSHEDPEVKENW | | NLAPSKNEHL | AASSLQS | GNSQESV |
| | KGRFTISR | YVDGVEVHNAKTKPREEQYN | | RPRDLISDIN | GVPSRFS | TEQDSKD |
| | DNSKNTLY | STYRVVSVLTVLHQDWLNGK | | VIVLELKGSE | GSGSGTD | STYSLSS |
| | LQMNSLRA | EYKCKVSNKALPAPIEKTIS | | TTFMCEYADE | FTLTISS | TLTLSKA |
| | EDTAVYYC | KAKGQPREPQVYTLPPSREE | | TATIVEFINR | LQPEDFA | DYEKHKV |
| | ARDRPYYY | MTKNQVSLTCLVKGFYPSDI | | WITFSQSIIS | TYYCQQY | YACEVTH |
| | YMDVWGKG | AVEWESNGQPENNYKTTPPV | | TLT (SEQ | KSYPVTE | QGLSSPV |
| | TTVTVSS | LDSDGSFFLYSKLTVDKSRW | | ID NO: 41) | GQGTKVE | TKSENRG |
| | (SEQ ID | QQGNVFSCSVMHEALHNHYT | | | IK (SEQ | EC (SEQ |
| | NO: | QKSLSLSPG (SEQ ID | | | ID NO: | ID NO: |
| | 1395) | NO: 44) | | | 1363) | 45) |
| MIAB | EVQLLESG | ASTKGPSVFPLAPSSKSTSG | GGGGS | APTSSSTKKT | DIQMTQS | RTVAAPS |
| 183 | GGLVQPGG | GTAALGCLVKDYFPEPVTVS | (SEQ | QLQLEHLLLD | PSSLSAS | VFIFPPS |
| | SLRLSCAA | WNSGALTSGVHTFPAVLQSS | ID NO: | LQMILNGINN | VGDRVTI | DEQLKSG |
| | SGFTFSSY | GLYSLSSVVTVPSSSLGTQT | 23) | YKNPKLTRML | TCRASQS | TASVVCL |
| | WMHWVRQA | YICNVNHKPSNTKVDKKVEP | | TFKFYMPKKA | VSSSLAW | LNNFYPR |
| | PGKGLEWV | KSCDKTHTCPPCPAPEAAGA | | TELKHLQCLE | YQQKPGK | EAKVQWK |
| | SAISGSGG | PSVFLFPPKPKDTLMISRTP | | EELKPLEEAL | APKLLIY | VDNALQS |
| | STYYADSV | EVTCVVVDVSHEDPEVKENW | | NLAPSKNFHL | AASSLQS | GNSQESV |
| | KGRFTISR | YVDGVEVHNAKTKPREEQYN | | RPRDLISDIN | GVPSRES | TEQDSKD |
| | DNSKNTLY | STYRVVSVLTVLHQDWLNGK | | VIVLELKGSE | GSGSGTD | STYSLSS |
| | LQMNSLRA | EYKCKVSNKALPAPIEKTIS | | TTEMCEYADE | FTLTISS | TLTLSKA |
| | EDTAVYYC | KAKGQPREPQVYTLPPSREE | | TATIVEFINR | LQPEDFA | DYEKHKV |
| | ARDRPYYY | MTKNQVSLTCLVKGFYPSDI | | WITFSQSIIS | TYYCQQY | YACEVTH |
| | YMDVWGKG | AVEWESNGQPENNYKTTPPV | | TLT (SEQ | KSYPVTF | QGLSSPV |
| | TTVTVSS | LDSDGSFFLYSKLTVDKSRW | | ID NO: 41) | GQGTKVE | TKSENRG |
| | (SEQ ID | QQGNVFSCSVMHEALHNHYT | | | IK (SEQ | EC (SEQ |
| | NO: | QKSLSLSPG (SEQ ID | | | ID NO: | ID NO: |
| | 1395) | NO: 44) | | | 1364) | 45) |
| MIAB | EVQLLESG | ASTKGPSVFPLAPSSKSTSG | GGGGS | APTSSSTKKT | DIQMTQS | RTVAAPS |
| 184 | GGLVQPGG | GTAALGCLVKDYFPEPVTVS | (SEQ | QLQLEHLLLD | PSSLSAS | VFIFPPS |
| | SLRLSCAA | WNSGALTSGVHTFPAVLQSS | ID NO: | LQMILNGINN | VGDRVTI | DEQLKSG |
| | SGFTFSSY | GLYSLSSVVTVPSSSLGTQT | 23) | YKNPKLTRML | TCRASQS | TASVVCL |
| | WMHWVRQA | YICNVNHKPSNTKVDKKVEP | | TFKFYMPKKA | ISSSLAW | LNNFYPR |
| | PGKGLEWV | KSCDKTHTCPPCPAPEAAGA | | TELKHLQCLE | YQQKPGK | EAKVQWK |
| | SAISGSGG | PSVFLFPPKPKDTLMISRTP | | EELKPLEEAL | APKLLIY | VDNALQS |
| | STYYADSV | EVTCVVVDVSHEDPEVKENW | | NLAPSKNFHL | AASSLQS | GNSQESV |
| | KGRFTISR | YVDGVEVHNAKTKPREEQYN | | RPRDLISDIN | GVPSRFS | TEQDSKD |
| | DNSKNTLY | STYRVVSVLTVLHQDWLNGK | | VIVLELKGSE | GSGSGTD | STYSLSS |
| | LQMNSLRA | EYKCKVSNKALPAPIEKTIS | | TTFMCEYADE | FTLTISS | TLTLSKA |
| | EDTAVYYC | KAKGQPREPQVYTLPPSREE | | TATIVEFINR | LQPEDFA | DYEKHKV |
| | ARDRPYYY | MTKNQVSLTCLVKGFYPSDI | | WITFSQSIIS | TYYCQQY | YACEVTH |
| | YMDVWGKG | AVEWESNGQPENNYKTTPPV | | TLT (SEQ | KSYPVTF | QGLSSPV |
| | TTVTVSS | LDSDGSFFLYSKLTVDKSRW | | ID NO: 41) | GQGTKVE | TKSENRG |
| | (SEQ ID | QQGNVFSCSVMHEALHNHYT | | | IK (SEQ | EC (SEQ |
| | NO: | QKSLSLSPGSEQ ID | | | ID NO: | ID NO: |
| | 1395) | NO: 44) | | | 1367) | 45) |
| MIAB | EVQLLESG | ASTKGPSVFPLAPSSKSTSG | GGGGS | APTSSSTKKT | DIQMTQS | RTVAAPS |
| 185 | GGLVQPGG | GTAALGCLVKDYFPEPVTVS | (SEQ | QLQLEHLLLD | PSSLSAS | VFIFPPS |
| | SLRLSCAA | WNSGALTSGVHTFPAVLQSS | ID NO: | LQMILNGINN | VGDRVTI | DEQLKSG |
| | SGFTESSY | GLYSLSSVVTVPSSSLGTQT | 23) | YKNPKLTRML | TCRASQS | TASVVCL |
| | WMHWVRQA | YICNVNHKPSNTKVDKKVEP | | TFKFYMPKKA | ISRSLAW | LNNFYPR |
| | PGKGLEWI | KSCDKTHTCPPCPAPEAAGA | | TELKHLQCLE | YQQKPGK | EAKVQWK |
| | SYISGDSG | PSVFLFPPKPKDTLMISRTP | | EELKPLEEAL | APKLLIY | VDNALQS |
| | YTNYADSV | EVTCVVVDVSHEDPEVKENW | | NLAPSKNEHL | AASSLQS | GNSQESV |
| | KGRFTISR | YVDGVEVHNAKTKPREEQYN | | RPRDLISDIN | GVPSRES | TEQDSKD |
| | DNSKNTLY | STYRVVSVLTVLHQDWLNGK | | VIVLELKGSE | GSGSGTD | STYSLSS |
| | LQMNSLRA | EYKCKVSNKALPAPIEKTIS | | TTEMCEYADE | FTLTISS | TLTLSKA |
| | EDTAVYYC | KAKGQPREPQVYTLPPSREE | | TATIVEFINR | LQPEDFA | DYEKHKV |
| | ARDRPYYY | MTKNQVSLTCLVKGFYPSDI | | WITFSQSIIS | TYYCQQY | YACEVTH |
| | IMDVWGKG | AVEWESNGQPENNYKTTPPV | | TLT (SEQ | KSYPVTF | QGLSSPV |
| | TTVTVSS | LDSDGSFFLYSKLTVDKSRW | | ID NO: 41) | GQGTKVE | TKSENRG |
| | (SEQ ID | QQGNVFSCSVMHEALHNHYT | | | IK (SEQ | EC (SEQ |
| | NO: | QKSLSLSPG (SEQ ID | | | ID NO: | ID NO: |
| | 1396) | NO: 44) | | | 1363) | 45) |
| MIAB | EVQLLESG | ASTKGPSVFPLAPSSKSTSG | GGGGS | APTSSSTKKT | DIQMTQS | RTVAAPS |
| 186 | GGLVQPGG | GTAALGCLVKDYFPEPVTVS | (SEQ | QLQLEHLLLD | PSSLSAS | VFIFPPS |
| | SLRLSCAA | WNSGALTSGVHTFPAVLQSS | ID NO: | LQMILNGINN | VGDRVTI | DEQLKSG |
| | SGFTESSY | GLYSLSSVVTVPSSSLGTQT | 23) | YKNPKLTRML | TCRASQS | TASVVCL |
| | WMHWVRQA | YICNVNHKPSNTKVDKKVEP | | TFKFYMPKKA | VSSSLAW | LNNFYPR |
| | PGKGLEWI | KSCDKTHTCPPCPAPEAAGA | | TELKHLQCLE | YQQKPGK | EAKVQWK |
| | SYISGDSG | PSVFLFPPKPKDTLMISRTP | | EELKPLEEAL | APKLLIY | VDNALQS |
| | YTNYADSV | EVTCVVVDVSHEDPEVKENW | | NLAPSKNEHL | AASSLQS | GNSQESV |
| | KGRFTISR | YVDGVEVHNAKTKPREEQYN | | RPRDLISDIN | GVPSRFS | TEQDSKD |
| | DNSKNTLY | STYRVVSVLTVLHQDWLNGK | | VIVLELKGSE | GSGSGTD | STYSLSS |
| | LQMNSLRA | EYKCKVSNKALPAPIEKTIS | | TTFMCEYADE | FTLTISS | TLTLSKA |
| | EDTAVYYC | KAKGQPREPQVYTLPPSREE | | TATIVEFINR | LQPEDFA | DYEKHKV |
| | ARDRPYYY | MTKNQVSLTCLVKGFYPSDI | | WITFSQSIIS | TYYCQQY | YACEVTH |
| | IMDVWGKG | AVEWESNGQPENNYKTTPPV | | TLT (SEQ | KSYPVTF | QGLSSPV |
| | TTVTVSS | LDSDGSFFLYSKLTVDKSRW | | ID NO: 41) | GQGTKVE | TKSFNRG |
| | (SEQ ID | QQGNVFSCSVMHEALHNHYT | | | IK (SEQ | EC (SEQ |
| | NO: | QKSLSLSPG (SEQ ID | | | ID NO: | ID NO: |
| | 1396) | NO: 44) | | | 1364) | 45) |
| MIAB | EVQLLESG | ASTKGPSVFPLAPSSKSTSG | GGGGS | APTSSSTKKT | DIQMTQS | RTVAAPS |
| 187 | GGLVQPGG | GTAALGCLVKDYFPEPVTVS | (SEQ | QLQLEHLLLD | PSSLSAS | VFIFPPS |
| | SLRLSCAA | WNSGALTSGVHTFPAVLQSS | ID NO: | LQMILNGINN | VGDRVTI | DEQLKSG |
| | SGFTESSY | GLYSLSSVVTVPSSSLGTQT | 23) | YKNPKLTRML | TCRASQS | TASVVCL |
| | WMHWVRQA | YICNVNHKPSNTKVDKKVEP | | TFKFYMPKKA | ISSSLAW | LNNFYPR |
| | PGKGLEWI | KSCDKTHTCPPCPAPEAAGA | | TELKHLQCLE | YQQKPGK | EAKVQWK |
| | SYISGDSG | PSVFLFPPKPKDTLMISRTP | | EELKPLEEAL | APKLLIY | VDNALQS |
| | YTNYADSV | EVTCVVVDVSHEDPEVKENW | | NLAPSKNEHL | AASSLQS | GNSQESV |
| | KGRFTISR | YVDGVEVHNAKTKPREEQYN | | RPRDLISDIN | GVPSRES | TEQDSKD |
| | DNSKNTLY | STYRVVSVLTVLHQDWLNGK | | VIVLELKGSE | GSGSGTD | STYSLSS |
| | LQMNSLRA | EYKCKVSNKALPAPIEKTIS | | TTEMCEYADE | FTLTISS | TLTLSKA |
| | EDTAVYYC | KAKGQPREPQVYTLPPSREE | | TATIVEFINR | LQPEDFA | DYEKHKV |
| | ARDRPYYY | MTKNQVSLTCLVKGFYPSDI | | WITFSQSIIS | TYYCQQY | YACEVTH |
| | IMDVWGKG | AVEWESNGQPENNYKTTPPV | | TLT (SEQ | KSYPVTF | QGLSSPV |
| | TTVTVSS | LDSDGSFFLYSKLTVDKSRW | | ID NO: 41) | GQGTKVE | TKSENRG |
| | (SEQ ID | QQGNVFSCSVMHEALHNHYT | | | IK (SEQ | EC (SEQ |
| | NO: | QKSLSLSPG (SEQ ID | | | ID NO: | ID NO: |
| | 1396) | NO: 44) | | | 1367) | 45) |
| MIAB | EVQLLESG | ASTKGPSVFPLAPSSKSTSG | GGGGS | APTSSSTKKT | DIQMTQS | RTVAAPS |
| 188 | GGLVQPGG | GTAALGCLVKDYFPEPVTVS | (SEQ | QLQLEHLLLD | PSSLSAS | VFIFPPS |
| | SLRLSCAA | WNSGALTSGVHTFPAVLQSS | ID NO: | LQMILNGINN | VGDRVTI | DEQLKSG |
| | SGFTESDE | GLYSLSSVVTVPSSSLGTQT | 23) | YKNPKLTRML | TCRASQS | TASVVCL |
| | WMHWVRQA | YICNVNHKPSNTKVDKKVEP | | TFKFYMPKKA | ISRSLAW | LNNFYPR |
| | PGKGLEWV | KSCDKTHTCPPCPAPEAAGA | | TELKHLQCLE | YQQKPGK | EAKVQWK |
| | SAISGSGG | PSVFLFPPKPKDTLMISRTP | | EELKPLEEAL | APKLLIY | VDNALQS |
| | STYYADSV | EVTCVVVDVSHEDPEVKENW | | NLAPSKNEHL | AASSLQS | GNSQESV |
| | KGRFTISR | YVDGVEVHNAKTKPREEQYN | | RPRDLISDIN | GVPSRES | TEQDSKD |
| | DNSKNTLY | STYRVVSVLTVLHQDWLNGK | | VIVLELKGSE | GSGSGTD | STYSLSS |
| | LQMNSLRA | EYKCKVSNKALPAPIEKTIS | | TTEMCEYADE | FTLTISS | TLTLSKA |
| | EDTAVYYC | KAKGQPREPQVYTLPPSREE | | TATIVEFINR | LQPEDFA | DYEKHKV |
| | ARDRPYYY | MTKNQVSLTCLVKGFYPSDI | | WITFSQSIIS | TYYCQQY | YACEVTH |
| | IMDVWGKG | AVEWESNGQPENNYKTTPPV | | TLT (SEQ | KSYPVTF | QGLSSPV |
| | TTVTVSS | LDSDGSFFLYSKLTVDKSRW | | ID NO: 41) | GQGTKVE | TKSENRG |
| | (SEQ ID | QQGNVFSCSVMHEALHNHYT | | | IK (SEQ | EC (SEQ |
| | NO: | QKSLSLSPG (SEQ ID | | | ID NO: | ID NO: |
| | 1397) | NO: 44) | | | 1363) | 45) |
| MIAB | EVQLLESG | ASTKGPSVFPLAPSSKSTSG | GGGGS | APTSSSTKKT | DIQMTQS | RTVAAPS |
| 189 | GGLVQPGG | GTAALGCLVKDYFPEPVTVS | (SEQ | QLQLEHLLLD | PSSLSAS | VFIFPPS |
| | SLRLSCAA | WNSGALTSGVHTFPAVLQSS | ID NO: | LQMILNGINN | VGDRVTI | DEQLKSG |
| | SGFTFSDE | GLYSLSSVVTVPSSSLGTQT | 23) | YKNPKLTRML | TCRASQS | TASVVCL |
| | WMHWVRQA | YICNVNHKPSNTKVDKKVEP | | TFKFYMPKKA | VSSSLAW | LNNFYPR |
| | PGKGLEWV | KSCDKTHTCPPCPAPEAAGA | | TELKHLQCLE | YQQKPGK | EAKVQWK |
| | SAISGSGG | PSVFLFPPKPKDTLMISRTP | | EELKPLEEAL | APKLLIY | VDNALQS |
| | STYYADSV | EVTCVVVDVSHEDPEVKENW | | NLAPSKNFHL | AASSLQS | GNSQESV |
| | KGRFTISR | YVDGVEVHNAKTKPREEQYN | | RPRDLISDIN | GVPSRES | TEQDSKD |
| | DNSKNTLY | STYRVVSVLTVLHQDWLNGK | | VIVLELKGSE | GSGSGTD | STYSLSS |
| | LQMNSLRA | EYKCKVSNKALPAPIEKTIS | | TTFMCEYADE | FTLTISS | TLTLSKA |
| | EDTAVYYC | KAKGQPREPQVYTLPPSREE | | TATIVEFINR | LQPEDFA | DYEKHKV |
| | ARDRPYYY | MTKNQVSLTCLVKGFYPSDI | | WITFSQSIIS | TYYCQQY | YACEVTH |
| | IMDVWGKG | AVEWESNGQPENNYKTTPPV | | TLT (SEQ | KSYPVTF | QGLSSPV |
| | TTVTVSS | LDSDGSFFLYSKLTVDKSRW | | ID NO: 41) | GQGTKVE | TKSENRG |
| | (SEQ ID | QQGNVFSCSVMHEALHNHYT | | | IK (SEQ | EC (SEQ |
| | NO: | QKSLSLSPG (SEQ ID | | | ID NO: | ID NO: |
| | 1397) | NO: 44) | | | 1364) | 45) |
| MIAB | EVQLLESG | ASTKGPSVFPLAPSSKSTSG | GGGGS | APTSSSTKKT | DIQMTQS | RTVAAPS |
| 190 | GGLVQPGG | GTAALGCLVKDYFPEPVTVS | (SEQ | QLQLEHLLLD | PSSLSAS | VFIFPPS |
| | SLRLSCAA | WNSGALTSGVHTFPAVLQSS | ID NO: | LQMILNGINN | VGDRVTI | DEQLKSG |
| | SGFTESDE | GLYSLSSVVTVPSSSLGTQT | 23) | YKNPKLTRML | TCRASQS | TASVVCL |
| | WMHWVRQA | YICNVNHKPSNTKVDKKVEP | | TFKFYMPKKA | ISSSLAW | LNNFYPR |
| | PGKGLEWV | KSCDKTHTCPPCPAPEAAGA | | TELKHLQCLE | YQQKPGK | EAKVQWK |
| | SAISGSGG | PSVFLFPPKPKDTLMISRTP | | EELKPLEEAL | APKLLIY | VDNALQS |
| | STYYADSV | EVTCVVVDVSHEDPEVKENW | | NLAPSKNFHL | AASSLQS | GNSQESV |
| | KGRFTISR | YVDGVEVHNAKTKPREEQYN | | RPRDLISDIN | GVPSRES | TEQDSKD |
| | DNSKNTLY | STYRVVSVLTVLHQDWLNGK | | VIVLELKGSE | GSGSGTD | STYSLSS |
| | LQMNSLRA | EYKCKVSNKALPAPIEKTIS | | TTEMCEYADE | FTLTISS | TLTLSKA |
| | EDTAVYYC | KAKGQPREPQVYTLPPSREE | | TATIVEFINR | LQPEDFA | DYEKHKV |
| | ARDRPYYY | MTKNQVSLTCLVKGFYPSDI | | WITFSQSIIS | TYYCQQY | YACEVTH |
| | IMDVWGKG | AVEWESNGQPENNYKTTPPV | | TLT (SEQ | KSYPVTF | QGLSSPV |
| | TTVTVSS | LDSDGSFFLYSKLTVDKSRW | | ID NO: 41) | GQGTKVE | TKSFNRG |
| | (SEQ ID | QQGNVFSCSVMHEALHNHYT | | | IK (SEQ | EC (SEQ |
| | NO: | QKSLSLSPG (SEQ ID | | | ID NO: | ID NO: |
| | 1397) | NO: 44) | | | 1367) | 45) |
| MIAB | EVQLLESG | ASTKGPSVFPLAPSSKSTSG | GGGGS | APTSSSTKKT | DIQMTQS | RTVAAPS |
| 191 | GGLVQPGG | GTAALGCLVKDYFPEPVTVS | (SEQ | QLQLEHLLLD | PSSLSAS | VFIFPPS |
| | SLRLSCAA | WNSGALTSGVHTFPAVLQSS | ID NO: | LQMILNGINN | VGDRVTI | DEQLKSG |
| | SGFTESSY | GLYSLSSVVTVPSSSLGTQT | 23) | YKNPKLTRML | TCRASQS | TASVVCL |
| | WMHWVRQA | YICNVNHKPSNTKVDKKVEP | | TFKFYMPKKA | ISRSLAW | LNNFYPR |
| | PGKGLEWV | KSCDKTHTCPPCPAPEAAGA | | TELKHLQCLE | YQQKPGK | EAKVQWK |
| | SAISGSGG | PSVFLFPPKPKDTLMISRTP | | EELKPLEEAL | APKLLIY | VDNALQS |
| | STYYADSV | EVTCVVVDVSHEDPEVKENW | | NLAPSKNEHL | AASSLQS | GNSQESV |
| | KGRFTISR | YVDGVEVHNAKTKPREEQYN | | RPRDLISDIN | GVPSRES | TEQDSKD |
| | DNSKNTLY | STYRVVSVLTVLHQDWLNGK | | VIVLELKGSE | GSGSGTD | STYSLSS |
| | LQMNSLRA | EYKCKVSNKALPAPIEKTIS | | TTEMCEYADE | FTLTISS | TLTLSKA |
| | EDTAVYYC | KAKGQPREPQVYTLPPSREE | | TATIVEFINR | LQPEDFA | DYEKHKV |
| | ARDRPYYY | MTKNQVSLTCLVKGFYPSDI | | WITESQSIIS | TYYCQQY | YACEVTH |
| | IMDVWGKG | AVEWESNGQPENNYKTTPPV | | TLT (SEQ | KSYPVTF | QGLSSPV |
| | TTVTVSS | LDSDGSFFLYSKLTVDKSRW | | ID NO: 41) | GQGTKVE | TKSENRG |
| | (SEQ ID | QQGNVFSCSVMHEALHNHYT | | | IK (SEQ | EC (SEQ |
| | NO: | QKSLSLSPG (SEQ ID | | | ID NO: | ID NO: |
| | 1398) | NO: 44) | | | 1363) | 45) |
| MIAB | EVQLLESG | ASTKGPSVFPLAPSSKSTSG | GGGGS | APTSSSTKKT | DIQMTQS | RTVAAPS |
| 192 | GGLVQPGG | GTAALGCLVKDYFPEPVTVS | (SEQ | QLQLEHLLLD | PSSLSAS | VFIFPPS |
| | SLRLSCAA | WNSGALTSGVHTFPAVLQSS | ID NO: | LQMILNGINN | VGDRVTI | DEQLKSG |
| | SGFTFSSY | GLYSLSSVVTVPSSSLGTQT | 23) | YKNPKLTRML | TCRASQS | TASVVCL |
| | WMHWVRQA | YICNVNHKPSNTKVDKKVEP | | TFKFYMPKKA | VSSSLAW | LNNFYPR |
| | PGKGLEWV | KSCDKTHTCPPCPAPEAAGA | | TELKHLQCLE | YQQKPGK | EAKVQWK |
| | SAISGSGG | PSVFLFPPKPKDTLMISRTP | | EELKPLEEAL | APKLLIY | VDNALQS |
| | STYYADSV | EVTCVVVDVSHEDPEVKENW | | NLAPSKNEHL | AASSLQS | GNSQESV |
| | KGRFTISR | YVDGVEVHNAKTKPREEQYN | | RPRDLISDIN | GVPSRES | TEQDSKD |
| | DNSKNTLY | STYRVVSVLTVLHQDWLNGK | | VIVLELKGSE | GSGSGTD | STYSLSS |
| | LQMNSLRA | EYKCKVSNKALPAPIEKTIS | | TTFMCEYADE | FTLTISS | TLTLSKA |
| | EDTAVYYC | KAKGQPREPQVYTLPPSREE | | TATIVEFINR | LQPEDFA | DYEKHKV |
| | ARDRPYYY | MTKNQVSLTCLVKGFYPSDI | | WITFSQSIIS | TYYCQQY | YACEVTH |
| | IMDVWGKG | AVEWESNGQPENNYKTTPPV | | TLT (SEQ | KSYPVTF | QGLSSPV |
| | TTVTVSS | LDSDGSFFLYSKLTVDKSRW | | ID NO: 41) | GQGTKVE | TKSENRG |
| | (SEQ ID | QQGNVFSCSVMHEALHNHYT | | | IK (SEQ | EC (SEQ |
| | NO: | QKSLSLSPG (SEQ ID | | | ID NO: | ID NO: |
| | 1398) | NO: 44) | | | 1364) | 45) |
| MIAB | EVQLLESG | ASTKGPSVFPLAPSSKSTSG | GGGGS | APTSSSTKKT | DIQMTQS | RTVAAPS |
| 193 | GGLVQPGG | GTAALGCLVKDYFPEPVTVS | (SEQ | QLQLEHLLLD | PSSLSAS | VFIFPPS |
| | SLRLSCAA | WNSGALTSGVHTFPAVLQSS | ID NO: | LQMILNGINN | VGDRVTI | DEQLKSG |
| | SGFTESSY | GLYSLSSVVTVPSSSLGTQT | 23) | YKNPKLTRML | TCRASQS | TASVVCL |
| | WMHWVRQA | YICNVNHKPSNTKVDKKVEP | | TFKFYMPKKA | ISSSLAW | LNNFYPR |
| | PGKGLEWV | KSCDKTHTCPPCPAPEAAGA | | TELKHLQCLE | YQQKPGK | EAKVQWK |
| | SAISGSGG | PSVFLFPPKPKDTLMISRTP | | EELKPLEEAL | APKLLIY | VDNALQS |
| | STYYADSV | EVTCVVVDVSHEDPEVKENW | | NLAPSKNFHL | AASSLQS | GNSQESV |
| | KGRFTISR | YVDGVEVHNAKTKPREEQYN | | RPRDLISDIN | GVPSRFS | TEQDSKD |
| | DNSKNTLY | STYRVVSVLTVLHQDWLNGK | | VIVLELKGSE | GSGSGTD | STYSLSS |
| | LQMNSLRA | EYKCKVSNKALPAPIEKTIS | | TTEMCEYADE | FTLTISS | TLTLSKA |
| | EDTAVYYC | KAKGQPREPQVYTLPPSREE | | TATIVEFINR | LQPEDFA | DYEKHKV |
| | ARDRPYYY | MTKNQVSLTCLVKGFYPSDI | | WITFSQSIIS | TYYCQQY | YACEVTH |
| | IMDVWGKG | AVEWESNGQPENNYKTTPPV | | TLT (SEQ | KSYPVTF | QGLSSPV |
| | TTVTVSS | LDSDGSFFLYSKLTVDKSRW | | ID NO: 41) | GQGTKVE | TKSENRG |
| | (SEQ ID | QQGNVFSCSVMHEALHNHYT | | | IK (SEQ | EC (SEQ |
| | NO: | QKSLSLSPG (SEQ ID | | | ID NO: | ID NO: |
| | 1398) | NO: 44) | | | 1367) | 45) |
| MIAB | EVQLLESG | ASTKGPSVFPLAPSSKSTSG | GGGGS | APTSSSTKKT | DIQMTQS | RTVAAPS |
| 194 | GGLVQPGG | GTAALGCLVKDYFPEPVTVS | (SEQ | QLQLEHLLLD | PSSLSAS | VFIFPPS |
| | SLRLSCAA | WNSGALTSGVHTFPAVLQSS | ID NO: | LQMILNGINN | VGDRVTI | DEQLKSG |
| | SGFTFSDE | GLYSLSSVVTVPSSSLGTQT | 23) | YKNPKLTRML | TCRASQS | TASVVCL |
| | WMHWVRQA | YICNVNHKPSNTKVDKKVEP | | TFKFYMPKKA | ISRSLAW | LNNFYPR |
| | PGKGLEWI | KSCDKTHTCPPCPAPEAAGA | | TELKHLQCLE | YQQKPGK | EAKVQWK |
| | SYISGDSG | PSVFLFPPKPKDTLMISRTP | | EELKPLEEAL | APKLLIY | VDNALQS |
| | YTNYADSV | EVTCVVVDVSHEDPEVKENW | | NLAPSKNEHL | AASSLQS | GNSQESV |
| | KGRFTISR | YVDGVEVHNAKTKPREEQYN | | RPRDLISDIN | GVPSRES | TEQDSKD |
| | DNSKNTLY | STYRVVSVLTVLHQDWLNGK | | VIVLELKGSE | GSGSGTD | STYSLSS |
| | LQMNSLRA | EYKCKVSNKALPAPIEKTIS | | TTFMCEYADE | FTLTISS | TLTLSKA |
| | EDTAVYYC | KAKGQPREPQVYTLPPSREE | | TATIVEFINR | LQPEDFA | DYEKHKV |
| | ARDRPYYY | MTKNQVSLTCLVKGFYPSDI | | WITFSQSIIS | TYYCQQY | YACEVTH |
| | IMDVWGKG | AVEWESNGQPENNYKTTPPV | | TLT (SEQ | KSYPVTE | QGLSSPV |
| | TTVTVSS | LDSDGSFFLYSKLTVDKSRW | | ID NO: 41) | GQGTKVE | TKSENRG |
| | (SEQ ID | QQGNVFSCSVMHEALHNHYT | | | IK (SEQ | EC (SEQ |
| | NO: | QKSLSLSPG (SEQ ID | | | ID NO: | ID NO: |
| | 1387) | NO: 44) | | | 1363) | 45) |
| MIAB | EVQLLESG | ASTKGPSVFPLAPSSKSTSG | GGGGS | APTSSSTKKT | DIQMTQS | RTVAAPS |
| 195 | GGLVQPGG | GTAALGCLVKDYFPEPVTVS | (SEQ | QLQLEHLLLD | PSSLSAS | VFIFPPS |
| | SLRLSCAA | WNSGALTSGVHTFPAVLQSS | ID NO: | LQMILNGINN | VGDRVTI | DEQLKSG |
| | SGFTESDE | GLYSLSSVVTVPSSSLGTQT | 23) | YKNPKLTRML | TCRASQS | TASVVCL |
| | WMHWVRQA | YICNVNHKPSNTKVDKKVEP | | TFKFYMPKKA | VSSSLAW | LNNFYPR |
| | PGKGLEWI | KSCDKTHTCPPCPAPEAAGA | | TELKHLQCLE | YQQKPGK | EAKVQWK |
| | SYISGDSG | PSVFLFPPKPKDTLMISRTP | | EELKPLEEAL | APKLLIY | VDNALQS |
| | YTNYADSV | EVTCVVVDVSHEDPEVKENW | | NLAPSKNFHL | AASSLQS | GNSQESV |
| | KGRFTISR | YVDGVEVHNAKTKPREEQYN | | RPRDLISDIN | GVPSRES | TEQDSKD |
| | DNSKNTLY | STYRVVSVLTVLHQDWLNGK | | VIVLELKGSE | GSGSGTD | STYSLSS |
| | LQMNSLRA | EYKCKVSNKALPAPIEKTIS | | TTFMCEYADE | FTLTISS | TLTLSKA |
| | EDTAVYYC | KAKGQPREPQVYTLPPSREE | | TATIVEFINR | LQPEDFA | DYEKHKV |
| | ARDRPYYY | MTKNQVSLTCLVKGFYPSDI | | WITFSQSIIS | TYYCQQY | YACEVTH |
| | IMDVWGKG | AVEWESNGQPENNYKTTPPV | | TLT (SEQ | KSYPVTF | QGLSSPV |
| | TTVTVSS | LDSDGSFFLYSKLTVDKSRW | | ID NO: 41) | GQGTKVE | TKSENRG |
| | (SEQ ID | QQGNVFSCSVMHEALHNHYT | | | IK (SEQ | EC (SEQ |
| | NO: | QKSLSLSPG (SEQ ID | | | ID NO: | ID NO: |
| | 1387) | NO: 44) | | | 1364) | 45) |
| MIAB | EVQLLESG | ASTKGPSVFPLAPSSKSTSG | GGGGS | APTSSSTKKT | DIQMTQS | RTVAAPS |
| 196 | GGLVQPGG | GTAALGCLVKDYFPEPVTVS | (SEQ | QLQLEHLLLD | PSSLSAS | VFIFPPS |
| | SLRLSCAA | WNSGALTSGVHTFPAVLQSS | ID NO: | LQMILNGINN | VGDRVTI | DEQLKSG |
| | SGFTESDE | GLYSLSSVVTVPSSSLGTQT | 23) | YKNPKLTRML | TCRASQS | TASVVCL |
| | WMHWVRQA | YICNVNHKPSNTKVDKKVEP | | TFKFYMPKKA | ISSSLAW | LNNFYPR |
| | PGKGLEWI | KSCDKTHTCPPCPAPEAAGA | | TELKHLQCLE | YQQKPGK | EAKVQWK |
| | SYISGDSG | PSVFLFPPKPKDTLMISRTP | | EELKPLEEAL | APKLLIY | VDNALQS |
| | YTNYADSV | EVTCVVVDVSHEDPEVKENW | | NLAPSKNEHL | AASSLQS | GNSQESV |
| | KGRFTISR | YVDGVEVHNAKTKPREEQYN | | RPRDLISDIN | GVPSRES | TEQDSKD |
| | DNSKNTLY | STYRVVSVLTVLHQDWLNGK | | VIVLELKGSE | GSGSGTD | STYSLSS |
| | LQMNSLRA | EYKCKVSNKALPAPIEKTIS | | TTFMCEYADE | FTLTISS | TLTLSKA |
| | EDTAVYYC | KAKGQPREPQVYTLPPSREE | | TATIVEFINR | LQPEDFA | DYEKHKV |
| | ARDRPYYY | MTKNQVSLTCLVKGFYPSDI | | WITFSQSIIS | TYYCQQY | YACEVTH |
| | IMDVWGKG | AVEWESNGQPENNYKTTPPV | | TLT (SEQ | KSYPVTE | QGLSSPV |
| | TTVTVSS | LDSDGSFFLYSKLTVDKSRW | | ID NO: 41) | GQGTKVE | TKSENRG |
| | (SEQ ID | QQGNVFSCSVMHEALHNHYT | | | IK (SEQ | EC (SEQ |
| | NO: | QKSLSLSPG (SEQ ID | | | ID NO: | ID NO: |
| | 1387) | NO: 44) | | | 1367) | 45) |
| MIAB | EVQLLESG | ASTKGPSVFPLAPSSKSTSG | GGGGS | APTSSSTKKT | DIQMTQS | RTVAAPS |
| 197 | GGLVQPGG | GTAALGCLVKDYFPEPVTVS | (SEQ | QLQLEHLLLD | PSSLSAS | VFIFPPS |
| | SLRLSCAA | WNSGALTSGVHTFPAVLQSS | ID NO: | LQMILNGINN | VGDRVTI | DEQLKSG |
| | SGFTESDE | GLYSLSSVVTVPSSSLGTQT | 23) | YKNPKLTRML | TCRASQS | TASVVCL |
| | WMHWVRQA | YICNVNHKPSNTKVDKKVEP | | TFKFYMPKKA | ISRSLAW | LNNFYPR |
| | PGKGLEWI | KSCDKTHTCPPCPAPEAAGA | | TELKHLQCLE | YQQKPGK | EAKVQWK |
| | SYISGDSG | PSVFLFPPKPKDTLMISRTP | | EELKPLEEAL | APKLLIY | VDNALQS |
| | YTNYADSV | EVTCVVVDVSHEDPEVKENW | | NLAPSKNEHL | AASSLQS | GNSQESV |
| | KGRFTISR | YVDGVEVHNAKTKPREEQYN | | RPRDLISDIN | GVPSRES | TEQDSKD |
| | DNSKNTLY | STYRVVSVLTVLHQDWLNGK | | VIVLELKGSE | GSGSGTD | STYSLSS |
| | LQMNSLRA | EYKCKVSNKALPAPIEKTIS | | TTFMCEYADE | FTLTISS | TLTLSKA |
| | EDTAVYYC | KAKGQPREPQVYTLPPSREE | | TATIVEFINR | LQPEDFA | DYEKHKV |
| | ARDRPYYY | MTKNQVSLTCLVKGFYPSDI | | WITFSQSIIS | TYYCQQY | YACEVTH |
| | IMDVWGKG | AVEWESNGQPENNYKTTPPV | | TLT (SEQ | KSYPVTF | QGLSSPV |
| | TTVTVSS | LDSDGSFFLYSKLTVDKSRW | | ID NO: 41) | GQGTKVE | TKSENRG |
| | (SEQ ID | QQGNVFSCSVMHEALHNHYT | | | IK (SEQ | EC (SEQ |
| | NO: | QKSLSLSPG (SEQ ID | | | ID NO: | ID NO: |
| | 1387) | NO: 44) | | | 1363) | 45) |
| MIAB | EVQLLESG | ASTKGPSVFPLAPSSKSTSG | GGGGS | APTSSSTKKT | DIQMTQS | RTVAAPS |
| 198 | GGLVQPGG | GTAALGCLVKDYFPEPVTVS | (SEQ | QLQLEHLLLD | PSSLSAS | VFIFPPS |
| | SLRLSCAA | WNSGALTSGVHTFPAVLQSS | ID NO: | LQMILNGINN | VGDRVTI | DEQLKSG |
| | SGFTESDE | GLYSLSSVVTVPSSSLGTQT | 23) | YKNPKLTRML | TCRASQS | TASVVCL |
| | WMHWVRQA | YICNVNHKPSNTKVDKKVEP | | TFKFYMPKKA | VSRSLAW | LNNFYPR |
| | PGKGLEWI | KSCDKTHTCPPCPAPEAAGA | | TELKHLQCLE | YQQKPGK | EAKVQWK |
| | SYISGDSG | PSVFLFPPKPKDTLMISRTP | | EELKPLEEAL | APKLLIY | VDNALQS |
| | YTNYADSV | EVTCVVVDVSHEDPEVKENW | | NLAPSKNFHL | AASSLQS | GNSQESV |
| | KGRFTISR | YVDGVEVHNAKTKPREEQYN | | RPRDLISDIN | GVPSRES | TEQDSKD |
| | DNSKNTLY | STYRVVSVLTVLHQDWLNGK | | VIVLELKGSE | GSGSGTD | STYSLSS |
| | LQMNSLRA | EYKCKVSNKALPAPIEKTIS | | TTFMCEYADE | FTLTISS | TLTLSKA |
| | EDTAVYYC | KAKGQPREPQVYTLPPSREE | | TATIVEFINR | LQPEDFA | DYEKHKV |
| | ARDRPYYY | MTKNQVSLTCLVKGFYPSDI | | WITFSQSIIS | TYYCQQY | YACEVTH |
| | IMDVWGKG | AVEWESNGQPENNYKTTPPV | | TLT (SEQ | KSYPVTF | QGLSSPV |
| | TTVTVSS | LDSDGSFFLYSKLTVDKSRW | | ID NO: 41) | GQGTKVE | TKSENRG |
| | (SEQ ID | QQGNVFSCSVMHEALHNHYT | | | IK (SEQ | EC (SEQ |
| | NO: | QKSLSLSPG (SEQ ID | | | ID NO: | ID NO: |
| | 1387) | NO: 44) | | | 592) | 45) |
| PRNT | EVQLLESG | ASTKGPSVFPLAPSSKSTSG | GGGGS | APTSSSTKKT | DIQMTQS | RTVAAPS |
| 1 | GGLVQPGG | GTAALGCLVKDYFPEPVTVS | (SEQ | QLQLEHLLLD | PSSLSAS | VFIFPPS |
| | SLRLSCAA | WNSGALTSGVHTFPAVLQSS | ID NO: | LQMILNGINN | VGDRVTI | DEQLKSG |
| | SGFTESDE | GLYSLSSVVTVPSSSLGTQT | 23) | YKNPKLTRML | TCRASQS | TASVVCL |
| | WMHWVRQA | YICNVNHKPSNTKVDKKVEP | | TFKFYMPKKA | VSRSLAW | LNNFYPR |
| | PGKGLEWI | KSCDKTHTCPPCPAPEAAGA | | TELKHLQCLE | YQQKPGK | EAKVQWK |
| | SYISGDSG | PSVFLFPPKPKDTLMISRTP | | EELKPLEEAL | APKLLIY | VDNALQS |
| | YTNYADSV | EVTCVVVDVSHEDPEVKENW | | NLAPSKNEHL | AASSLQS | GNSQESV |
| | KGRFTISR | YVDGVEVHNAKTKPREEQYN | | RPRDLISDIN | GVPSRES | TEQDSKD |
| | DNSKNTLY | STYRVVSVLTVLHQDWLNGK | | VIVLELKGSE | GSGSGTD | STYSLSS |
| | LQMNSLRA | EYKCKVSNKALPAPIEKTIS | | TTFMCEYADE | FTLTISS | TLTLSKA |
| | EDTAVYYC | KAKGQPREPQVYTLPPSREE | | TATIVEFINR | LQPEDFA | DYEKHKV |
| | ARDRPYYY | MTKNQVSLTCLVKGFYPSDI | | WITESQSIIS | TYYCQQY | YACEVTH |
| | YMDVWGKG | AVEWESNGQPENNYKTTPPV | | TLT (SEQ | KSYPVTF | QGLSSPV |
| | TTVTVSS | LDSDGSFFLYSKLTVDKSRW | | ID NO: 41) | GQGTKVE | TKSENRG |
| | (SEQ ID | QQGNVFSCSVMHEALHNHYT | | | IK (SEQ | EC (SEQ |
| | NO: 591) | QKSLSLSPG (SEQ ID | | | ID NO: | ID NO: |
| | | NO: 44) | | | 592) | 45) |

[0353] In some embodiments, the therapeutic compound comprises one or more sequences, or a combination thereof, selected from the Table 10. In some embodiments, the therapeutic compound comprises the peptides of SEQ ID NOs: 1387, 44, 23, 41, 1363, and 45.

[0354] In additional embodiments, the MAdCAM antibody comprises an IL-2 mutein fused to the N-terminus of an Fc heavy chain, wherein the Fc is further fused at its C-terminus to a MAdCAM scFv, and has one or more of the sequences as set forth in the following table

TABLE 11

| | | IL-2M- | | | | | |
|---|---|---|---|---|---|---|---|
| | | Fc | | | | Intra | |
| | | Linker | | Fc-scFv | scFv VH | scFv | scFv VK |
| Ab | IL-2M Seq | Seq | Fc Domain Seq | Linker | Seq | Linker | Seq |
| MIAB199 | APTSSSTKKT | GGGGSG | DKTHTCPPCPAPEAAG | GGGGS | EVQLLESGGG | GGGGSG | DIQMTQSPS |
| | QLQLEHLLLD | GGGSGG | APSVFLFPPKPKDTLM | (SEQ ID | LVQPGGSLRL | GGGSGG | SLSASVGDR |
| | LQMILNGINN | GGS | ISRTPEVTCVVVDVSH | NO: 23) | SCAASGFTFS | GGSGGG | VTITCRASQ |
| | YKNPKLTRML | (SEQ | EDPEVKFNWYVDGVEV | | DFWMHWVRQA | GS | SVSRSLAWY |
| | TFKFYMPKKA | ID NO: | HNAKTKPREEQYNSTY | | PGKGLEWISY | (SEQ | QQKPGKAPK |
| | TELKHLQCLE | 30) | RVVSVLTVLHQDWLNG | | ISGDSGYTNY | ID NO: | LLIYAASSL |
| | EELKPLEEAL | | KEYKCKVSNKALPAPI | | ADSVKGRFTI | 22) | QSGVPSRFS |
| | NLAPSKNFHL | | EKTISKAKGQPREPQV | | SRDNSKNTLY | | GSGSGTDFT |
| | RPRDLISDIN | | YTLPPSREEMTKNQVS | | LQMNSLRAED | | LTISSLQPE |
| | VIVLELKGSE | | LTCLVKGFYPSDIAVE | | TAVYYCARDR | | DFATYYCQQ |
| | TTFMCEYADE | | WESNGQPENNYKTTPP | | PYYYYMDVWG | | YKSYPVTFG |
| | TATIVEFINR | | VLDSDGSFFLYSKLTV | | KGTTVTVSS | | QGTKVEIK |
| | WITFSQSIIS | | DKSRWQQGNVFSCSVM | | (SEQ ID | | (SEQ ID |
| | TLT (SEQ | | HEALHNHYTQKSLSLS | | NO: 591) | | NO: 592) |
| | ID NO: 41) | | PG (SEQ ID NO: | | | | |
| | | | 21) | | | | |
| MIAB200 | APTSSSTKKT | GGGGSG | DKTHTCPPCPAPEAAG | GGGGSGG | EVQLLESGGG | GGGGSG | DIQMTQSPS |
| | QLQLEHLLLD | GGGSGG | APSVFLFPPKPKDTLM | GGS | LVQPGGSLRL | GGGSGG | SLSASVGDR |
| | LQMILNGINN | GGS | ISRTPEVTCVVVDVSH | (SEQ ID | SCAASGFTFS | GGSGGG | VTITCRASQ |
| | YKNPKLTRML | (SEQ | EDPEVKFNWYVDGVEV | NO: | DFWMHWVRQA | GS | SVSRSLAWY |
| | TFKFYMPKKA | ID NO: | HNAKTKPREEQYNSTY | 619) | PGKGLEWISY | (SEQ | QQKPGKAPK |
| | TELKHLQCLE | | RVVSVLTVLHQDWLNG | | ISGDSGYTNY | ID NO: | LLIYAASSL |
| | EELKPLEEAL | 30) | KEYKCKVSNKALPAPI | | ADSVKGRFTI | 22) | QSGVPSRFS |
| | NLAPSKNFHL | | EKTISKAKGQPREPQV | | SRDNSKNTLY | | GSGSGTDFT |
| | RPRDLISDIN | | YTLPPSREEMTKNQVS | | LQMNSLRAED | | LTISSLQPE |
| | VIVLELKGSE | | LTCLVKGFYPSDIAVE | | TAVYYCARDR | | DFATYYCQQ |
| | TTFMCEYADE | | WESNGQPENNYKTTPP | | PYYYYMDVWG | | YKSYPVTFG |
| | TATIVEFINR | | VLDSDGSFFLYSKLTV | | KGTTVTVSS | | QGTKVEIK |
| | WITFSQSIIS | | DKSRWQQGNVFSCSVM | | (SEQ ID | | (SEQ ID |
| | TLT (SEQ | | HEALHNHYTQKSLSLS | | NO: 591) | | NO: 592) |
| | ID NO: 41) | | PG (SEQ ID NO: | | | | |
| | | | 21) | | | | |
| MIAB201 | APTSSSTKKT | GGGGSG | DKTHTCPPCPAPEAAG | GGGGSGG | EVQLLESGGG | GGGGSG | DIQMTQSPS |
| | QLQLEHLLLD | GGGSGG | APSVFLFPPKPKDTLM | GGSGGGG | LVQPGGSLRL | GGGSGG | SLSASVGDR |
| | LQMILNGINN | GGS | ISRTPEVTCVVVDVSH | S (SEQ | SCAASGFTFS | GGSGGG | VTITCRASQ |
| | YKNPKLTRML | (SEQ | EDPEVKFNWYVDGVEV | ID NO: | DFWMHWVRQA | GS | SVSRSLAWY |
| | TFKFYMPKKA | ID NO: | HNAKTKPREEQYNSTY | 30) | PGKGLEWISY | (SEQ | QQKPGKAPK |
| | TELKHLQCLE | 30) | RVVSVLTVLHQDWLNG | | ISGDSGYTNY | ID NO: | LLIYAASSL |
| | EELKPLEEAL | | KEYKCKVSNKALPAPI | | ADSVKGRFTI | 22) | QSGVPSRFS |
| | NLAPSKNFHL | | EKTISKAKGQPREPQV | | SRDNSKNTLY | | GSGSGTDFT |
| | RPRDLISDIN | | YTLPPSREEMTKNQVS | | LQMNSLRAED | | LTISSLQPE |
| | VIVLELKGSE | | LTCLVKGFYPSDIAVE | | TAVYYCARDR | | DFATYYCQQ |
| | TTFMCEYADE | | WESNGQPENNYKTTPP | | PYYYYMDVWG | | YKSYPVTFG |
| | TATIVEFINR | | VLDSDGSFFLYSKLTV | | KGTTVTVSS | | QGTKVEIK |
| | WITFSQSIIS | | DKSRWQQGNVFSCSVM | | (SEQ ID | | (SEQ ID |
| | TLT (SEQ | | HEALHNHYTQKSLSLS | | NO: 591) | | NO: 592) |
| | ID NO: 41) | | PG (SEQ ID NO: | | | | |
| | | | 21) | | | | |
| MIAB202 | APTSSSTKKT | GGGGSG | DKTHTCPPCPAPEAAG | GGGGS | EVQLLESGGG | GGGGSG | DIQMTQSPS |
| | QLQLEHLLLD | GGGSGG | APSVFLFPPKPKDTLM | (SEQ ID | LVQPGGSLRL | GGGSGG | SLSASVGDR |
| | LQMILNGINN | GGSGGG | ISRTPEVTCVVVDVSH | NO: 23) | SCAASGFTFS | GGSGGG | VTITCRASQ |
| | YKNPKLTRML | GS | EDPEVKFNWYVDGVEV | | DFWMHWVRQA | GS | SVSRSLAWY |
| | TFKFYMPKKA | (SEQ | HNAKTKPREEQYNSTY | | PGKGLEWISY | (SEQ | QQKPGKAPK |
| | TELKHLQCLE | ID NO: | RVVSVLTVLHQDWLNG | | ISGDSGYTNY | ID NO: | LLIYAASSL |
| | EELKPLEEAL | 22) | KEYKCKVSNKALPAPI | | ADSVKGRFTI | 22) | QSGVPSRFS |
| | NLAPSKNFHL | | EKTISKAKGQPREPQV | | SRDNSKNTLY | | GSGSGTDFT |
| | RPRDLISDIN | | YTLPPSREEMTKNQVS | | LQMNSLRAED | | LTISSLQPE |
| | VIVLELKGSE | | LTCLVKGFYPSDIAVE | | TAVYYCARDR | | DFATYYCQQ |
| | TTFMCEYADE | | WESNGQPENNYKTTPP | | PYYYYMDVWG | | YKSYPVTFG |
| | TATIVEFINR | | VLDSDGSFFLYSKLTV | | KGTTVTVSS | | QGTKVEIK |
| | WITFSQSIIS | | DKSRWQQGNVFSCSVM | | (SEQ ID | | (SEQ ID |
| | TLT (SEQ | | HEALHNHYTQKSLSLS | | NO: 591) | | NO: 592) |
| | ID NO: 41) | | PG (SEQ ID NO: | | | | |
| | | | 21) | | | | |
| MIAB203 | APTSSSTKKT | GGGGSG | DKTHTCPPCPAPEAAG | GGGGSGG | EVQLLESGGG | GGGGSG | DIQMTQSPS |
| | QLQLEHLLLD | GGGSGG | APSVFLFPPKPKDTLM | GGS | LVQPGGSLRL | GGGSGG | SLSASVGDR |
| | LQMILNGINN | GGSGGG | ISRTPEVTCVVVDVSH | (SEQ ID | SCAASGFTFS | GGSGGG | VTITCRASQ |
| | YKNPKLTRML | GS | EDPEVKFNWYVDGVEV | NO: | DFWMHWVRQA | GS | SVSRSLAWY |
| | TFKFYMPKKA | (SEQ | HNAKTKPREEQYNSTY | 619) | PGKGLEWISY | (SEQ | QQKPGKAPK |
| | TELKHLQCLE | ID NO: | RVVSVLTVLHQDWING | | ISGDSGYTNY | ID NO: | LLIYAASSL |
| | EELKPLEEAL | 22) | KEYKCKVSNKALPAPI | | ADSVKGRFTI | 22) | QSGVPSRFS |
| | NLAPSKNFHL | | EKTISKAKGQPREPQV | | SRDNSKNTLY | | GSGSGTDFT |
| | RPRDLISDIN | | YTLPPSREEMTKNQVS | | LQMNSLRAED | | LTISSLQPE |
| | VIVLELKGSE | | LTCLVKGFYPSDIAVE | | TAVYYCARDR | | DFATYYCQQ |
| | TTFMCEYADE | | WESNGQPENNYKTTPP | | PYYYYMDVWG | | YKSYPVTFG |
| | TATIVEFINR | | VLDSDGSFFLYSKLTV | | KGTTVTVSS | | QGTKVEIK |
| | WITFSQSIIS | | DKSRWQQGNVFSCSVM | | (SEQ ID | | (SEQ ID |
| | TLT (SEQ | | HEALHNHYTQKSLSLS | | NO: 591) | | NO: 592) |
| | ID NO: 41) | | PG (SEQ ID NO: | | | | |
| | | | 21) | | | | |
| MIAB204 | APTSSSTKKT | GGGGSG | DKTHTCPPCPAPEAAG | GGGGSGG | EVQLLESGGG | GGGGSG | DIQMTQSPS |
| | QLQLEHLLLD | GGGSGG | APSVFLFPPKPKDTLM | GGSGGGG | LVQPGGSLRL | GGGSGG | SLSASVGDR |
| | LQMILNGINN | GGSGGG | ISRTPEVTCVVVDVSH | S (SEQ | SCAASGFTFS | GGSGGG | VTITCRASQ |
| | YKNPKLTRML | GS | EDPEVKFNWYVDGVEV | ID NO: | DFWMHWVRQA | GS | SVSRSLAWY |
| | TFKFYMPKKA | (SEQ | HNAKTKPREEQYNSTY | 30) | PGKGLEWISY | (SEQ | QQKPGKAPK |
| | TELKHLQCLE | ID NO: | RVVSVLTVLHQDWLNG | | ISGDSGYTNY | ID NO: | LLIYAASSL |
| | EELKPLEEAL | 22) | KEYKCKVSNKALPAPI | | ADSVKGRFTI | 22) | QSGVPSRFS |
| | NLAPSKNFHL | | EKTISKAKGQPREPQV | | SRDNSKNTLY | | GSGSGTDFT |
| | RPRDLISDIN | | YTLPPSREEMTKNQVS | | LQMNSLRAED | | LTISSLQPE |
| | VIVLELKGSE | | LTCLVKGFYPSDIAVE | | TAVYYCARDR | | DFATYYCQQ |
| | TTFMCEYADE | | WESNGQPENNYKTTPP | | PYYYYMDVWG | | YKSYPVTFG |
| | TATIVEFINR | | VLDSDGSFFLYSKLTV | | KGTTVTVSS | | QGTKVEIK |
| | WITFSQSIIS | | DKSRWQQGNVFSCSVM | | (SEQ ID | | (SEQ ID |
| | TLT (SEQ | | HEALHNHYTQKSLSLS | | NO: 591) | | NO: 592) |
| | ID NO: 41) | | PG (SEQ ID NO: | | | | |
| | | | 21) | | | | |
| MIAB212 | APTSSSTKKT | GGGGSG | DKTHTCPPCPAPEAAG | GGGGSGG | EVQLLESGGG | GGGGSG | DIQMTQSPS |
| | QLQLEHLLLD | GGGSGG | APSVFLFPPKPKDTLM | GGSGGGG | LVQPGGSLRL | GGGSGG | SLSASVGDR |
| | LQMILNGINN | GGS | ISRTPEVTCVVVDVSH | S (SEQ | SCAASGFTFS | GGSGGG | VTITCRASQ |
| | YKNPKLTRML | (SEQ | EDPEVKFNWYVDGVEV | ID NO: | SYWMHWVRQA | GS | SISSSLAWY |
| | TFKFYMPKKA | ID NO: | HNAKTKPREEQYNSTY | 30) | PGKGLEWVSY | (SEQ | QQKPGKAPK |
| | TELKHLQCLE | 30) | RVVSVLTVLHQDWLNG | | ISGSGGYTNY | ID NO: | LLIYAASSL |
| | EELKPLEEAL | | KEYKCKVSNKALPAPI | | ADSVKGRFTI | 22) | QSGVPSRFS |
| | NLAPSKNFHL | | EKTISKAKGQPREPQV | | SRDNSKNTLY | | GSGSGTDFT |
| | RPRDLISDIN | | YTLPPSREEMTKNQVS | | LQMNSLRAED | | LTISSLQPE |
| | VIVLELKGSE | | LTCLVKGFYPSDIAVE | | TAVYYCARDR | | DFATYYCQQ |
| | TTFMCEYADE | | WESNGQPENNYKTTPP | | PYYYDMDVWG | | YKSYPVTFG |
| | TATIVEFINR | | VLDSDGSFFLYSKLTV | | KGTTVTVSS | | QGTKVEIK |
| | WITFSQSIIS | | DKSRWQQGNVFSCSVM | | (SEQ ID | | (SEQ ID |
| | TLT (SEQ | | HEALHNHYTQKSLSLS | | NO: 1445) | | NO: 1367) |
| | ID NO: 41) | | PG (SEQ ID NO: | | | | |
| | | | 21) | | | | |
| MIAB213 | APTSSSTKKT | GGGGSG | DKTHTCPPCPAPEAAG | GGGGSGG | EVQLLESGGG | GGGGSG | DIQMTQSPS |
| | QLQLEHLLLD | GGGSGG | APSVFLFPPKPKDTLM | GGSGGGG | LVQPGGSLRL | GGGSGG | SLSASVGDR |
| | LQMILNGINN | GGS | ISRTPEVTCVVVDVSH | S (SEQ | SCAASGFTFS | GGSGGG | VTITCRASQ |
| | YKNPKLTRML | (SEQ | EDPEVKFNWYVDGVEV | ID NO: | SYWMHWVRQA | GS | SISSSLAWY |
| | TFKFYMPKKA | ID NO: | HNAKTKPREEQYNSTY | 30) | PGKGLEWVSY | (SEQ | QQKPGKAPK |
| | TELKHLQCLE | 30) | RVVSVLTVLHQDWLNG | | ISGSGGYTNY | ID NO: | LLIYAASSL |
| | EELKPLEEAL | | KEYKCKVSNKALPAPI | | ADSVKGRFTI | 22) | QSGVPSRFS |
| | NLAPSKNFHL | | EKTISKAKGQPREPQV | | SRDNSKNTLY | | GSGSGTDFT |
| | RPRDLISDIN | | YTLPPSREEMTKNQVS | | LQMNSLRAED | | LTISSLQPE |
| | VIVLELKGSE | | LTCLVKGFYPSDIAVE | | TAVYYCARDR | | DFATYYCQQ |
| | TTFMCEYADE | | WESNGQPENNYKTTPP | | PYYYDIDVWG | | YKSYPVTFG |
| | TATIVEFINR | | VLDSDGSFFLYSKLTV | | KGTTVTVSS | | QGTKVEIK |
| | WITFSQSIIS | | DKSRWQQGNVFSCSVM | | (SEQ ID | | (SEQ ID |
| | TLT (SEQ | | HEALHNHYTQKSLSLS | | NO: 1477) | | NO: 1367) |
| | ID NO: 41) | | PG (SEQ ID NO: | | | | |
| | | | 21) | | | | |
| MIAB214 | APTSSSTKKT | GGGGSG | DKTHTCPPCPAPEAAG | GGGGSGG | EVQLLESGGG | GGGGSG | DIQMTQSPS |
| | QLQLEHLLLD | GGGSGG | APSVFLFPPKPKDTLM | GGSGGGG | LVQPGGSLRL | GGGSGG | SLSASVGDR |
| | LQMILNGINN | GGS | ISRTPEVTCVVVDVSH | S (SEQ | SCAASGFTFS | GGSGGG | VTITCRASQ |
| | YKNPKLTRML | (SEQ | EDPEVKFNWYVDGVEV | ID NO: | SYWMHWVRQA | GS | SISSSLAWY |
| | TFKFYMPKKA | ID NO: | HNAKTKPREEQYNSTY | 30) | PGKGLEWVSY | (SEQ | QQKPGKAPK |
| | TELKHLQCLE | 30) | RVVSVLTVLHQDWLNG | | ISGSGGYTNY | ID NO: | LLIYAASSL |
| | EELKPLEEAL | | KEYKCKVSNKALPAPI | | ADSVKGRFTI | 22) | QSGVPSRFS |
| | NLAPSKNFHL | | EKTISKAKGQPREPQV | | SRDNSKNTLY | | GSGSGTDFT |
| | RPRDLISDIN | | YTLPPSREEMTKNQVS | | LQMNSLRAED | | LTISSLQPE |
| | VIVLELKGSE | | LTCLVKGFYPSDIAVE | | TAVYYCARDR | | DFATYYCQQ |
| | TTFMCEYADE | | WESNGQPENNYKTTPP | | PYYYDLDVWG | | YKSYPVTFG |
| | TATIVEFINR | | VLDSDGSFFLYSKLTV | | KGTTVTVSS | | QGTKVEIK |
| | WITFSQSIIS | | DKSRWQQGNVFSCSVM | | (SEQ ID | | (SEQ ID |
| | TLT (SEQ | | HEALHNHYTQKSLSLS | | NO: 1480) | | NO: 1367) |
| | ID NO: 41) | | PG (SEQ ID NO: | | | | |
| | | | 21) | | | | |
| MIAB215 | APTSSSTKKT | GGGGSG | DKTHTCPPCPAPEAAG | GGGGSGG | EVQLLESGGG | GGGGSG | DIQMTQSPS |
| | QLQLEHLLLD | GGGSGG | APSVFLFPPKPKDTLM | GGSGGGG | LVQPGGSLRL | GGGSGG | SLSASVGDR |
| | LQMILNGINN | GGS | ISRTPEVTCVVVDVSH | S (SEQ | SCAASGFTFS | GGSGGG | VTITCRASQ |
| | YKNPKLTRML | (SEQ | EDPEVKFNWYVDGVEV | ID NO: | SYWMHWVRQA | GS | SISSSLAWY |
| | TFKFYMPKKA | ID NO: | HNAKTKPREEQYNSTY | 30) | PGKCLEWVSY | (SEQ | QQKPGKAPK |
| | TELKHLQCLE | 30) | RVVSVLTVLHQDWLNG | | ISGSGGYTNY | ID NO: | LLIYAASSL |
| | EELKPLEEAL | | KEYKCKVSNKALPAPI | | ADSVKGRFTI | 22) | QSGVPSRFS |
| | NLAPSKNFHL | | EKTISKAKGQPREPQV | | SRDNSKNTLY | | GSGSGTDFT |
| | RPRDLISDIN | | YTLPPSREEMTKNQVS | | LQMNSLRAED | | LTISSLQPE |
| | VIVLELKGSE | | LTCLVKGFYPSDIAVE | | TAVYYCARDR | | DFATYYCQQ |
| | TTFMCEYADE | | WESNGQPENNYKTTPP | | PYYYDMDVWG | | YKSYPVTFG |
| | TATIVEFINR | | VLDSDGSFFLYSKLTV | | KGTTVTVSS | | CGTKVEIK |
| | WITFSQSIIS | | DKSRWQQGNVFSCSVM | | (SEQ ID | | (SEQ ID |
| | TLT (SEQ | | HEALHNHYTQKSLSLS | | NO: 1542) | | NO: 1543) |
| | ID NO: 41) | | PG (SEQ ID NO: | | | | |
| | | | 21) | | | | |
| MIAB216 | APTSSSTKKT | GGGGSG | DKTHTCPPCPAPEAAG | GGGGSGG | EVQLLESGGG | GGGGSG | DIQMTQSPS |
| | QLQLEHLLLD | GGGSGG | APSVFLFPPKPKDTLM | GGSGGGG | LVQPGGSLRL | GGGSGG | SLSASVGDR |
| | LQMILNGINN | GGS | ISRTPEVTCVVVDVSH | S (SEQ | SCAASGFTFS | GGSGGG | VTITCRASQ |
| | YKNPKLTRML | (SEQ | EDPEVKFNWYVDGVEV | ID NO: | SYWMHWVRQA | GS | SISSSLAWY |
| | TFKFYMPKKA | ID NO: | HNAKTKPREEQYNSTY | 30) | PGKCLEWVSY | (SEQ | QQKPGKAPK |
| | TELKHLQCLE | 30) | RVVSVLTVLHQDWLNG | | ISGSGGYTNY | ID NO: | LLIYAASSL |
| | EELKPLEEAL | | KEYKCKVSNKALPAPI | | ADSVKGRFTI | 22) | QSGVPSRFS |
| | NLAPSKNFHL | | EKTISKAKGQPREPQV | | SRDNSKNTLY | | GSGSGTDFT |
| | RPRDLISDIN | | YTLPPSREEMTKNQVS | | LQMNSLRAED | | LTISSLQPE |
| | VIVLELKGSE | | LTCLVKGFYPSDIAVE | | TAVYYCARDR | | DFATYYCQQ |
| | TTFMCEYADE | | WESNGQPENNYKTTPP | | PYYYDIDVWG | | YKSYPVTFG |
| | TATIVEFINR | | VLDSDGSFFLYSKLTV | | KGTTVTVSS | | CGTKVEIK |
| | WITFSQSIIS | | DKSRWQQGNVFSCSVM | | (SEQ ID | | (SEQ ID |
| | TLT (SEQ | | HEALHNHYTQKSLSLS | | NO: 1544) | | NO: 1543) |
| | ID NO: 41) | | PG (SEQ ID NO: | | | | |
| | | | 21) | | | | |
| MIAB217 | APTSSSTKKT | GGGGSG | DKTHTCPPCPAPEAAG | GGGGSGG | EVQLLESGGG | GGGGSG | DIQMTQSPS |
| | QLQLEHLLLD | GGGSGG | APSVFLFPPKPKDTLM | GGSGGGG | LVQPGGSLRL | GGGSGG | SLSASVGDR |
| | LQMILNGINN | GGS | ISRTPEVTCVVVDVSH | S (SEQ | SCAASGFTFS | GGSGGG | VTITCRASQ |
| | YKNPKLTRML | (SEQ | EDPEVKFNWYVDGVEV | ID NO: | SYWMHWVRQA | GS | SISSSLAWY |
| | TFKFYMPKKA | ID NO: | HNAKTKPREEQYNSTY | 30) | PGKCLEWVSY | (SEQ | QQKPGKAPK |
| | TELKHLQCLE | 30) | RVVSVLTVLHQDWLNG | | ISGSGGYTNY | ID NO: | LLIYAASSL |
| | EELKPLEEAL | | KEYKCKVSNKALPAPI | | ADSVKGRFTI | 22) | QSGVPSRFS |
| | NLAPSKNFHL | | EKTISKAKGQPREPQV | | SRDNSKNTLY | | GSGSGTDFT |
| | RPRDLISDIN | | YTLPPSREEMTKNQVS | | LQMNSLRAED | | LTISSLQPE |
| | VIVLELKGSE | | LTCLVKGFYPSDIAVE | | TAVYYCARDR | | DFATYYCQQ |
| | TTFMCEYADE | | WESNGQPENNYKTTPP | | PYYYDLDVWG | | YKSYPVTFG |
| | TATIVEFINR | | VLDSDGSFFLYSKLTV | | KGTTVTVSS | | CGTKVEIK |
| | WITFSQSIIS | | DKSRWQQGNVFSCSVM | | (SEQ ID | | (SEQ ID |
| | TLT (SEQ | | HEALHNHYTQKSLSLS | | NO: 1545) | | NO: 1543) |
| | ID NO: 41) | | PG (SEQ ID NO: | | | | |
| | | | 21) | | | | |
| MIAB218 | APTSSSTKKT | GGGGSG | DKTHTCPPCPAPEAAG | GGGSEGG | EVQLLESGGG | GGGGSG | DIQMTQSPS |
| | QLQLEHLLLD | GGGSGG | APSVFLFPPKPKDTLM | GSEGGGS | LVQPGGSLRL | GGGSGG | SLSASVGDR |
| | LQMILNGINN | GGS | ISRTPEVTCVVVDVSH | E (SEQ | SCAASGFTFS | GGSGGG | VTITCRASQ |
| | YKNPKLTRML | (SEQ | EDPEVKFNWYVDGVEV | ID NO: | SYWMHWVRQA | GS | SISSSLAWY |
| | TFKFYMPKKA | ID NO: | HNAKTKPREEQYNSTY | 1546) | PGKGLEWVSY | (SEQ | QQKPGKAPK |
| | TELKHLQCLE | 30) | RVVSVLTVLHQDWLNG | | ISGSGGYTNY | ID NO: | LLIYAASSL |
| | EELKPLEEAL | | KEYKCKVSNKALPAPI | | ADSVKGRFTI | 22) | QSGVPSRFS |
| | NLAPSKNFHL | | EKTISKAKGQPREPQV | | SRDNSKNTLY | | GSGSGTDFT |
| | RPRDLISDIN | | YTLPPSREEMTKNQVS | | LQMNSLRAED | | LTISSLQPE |
| | VIVLELKGSE | | LTCLVKGFYPSDIAVE | | TAVYYCARDR | | DFATYYCQQ |
| | TTFMCEYADE | | WESNGQPENNYKTTPP | | PYYYDMDVWG | | YKSYPVTFG |
| | TATIVEFINR | | VLDSDGSFFLYSKLTV | | KGTTVTVSS | | QGTKVEIK |
| | WITFSQSIIS | | DKSRWQQGNVFSCSVM | | (SEQ ID | | (SEQ ID |
| | TLT (SEQ | | HEALHNHYTQKSLSLS | | NO: 1445) | | NO: 1367) |
| | ID NO: 41) | | PG (SEQ ID NO: | | | | |
| | | | 21) | | | | |
| MIAB219 | APTSSSTKKT | GGGGSG | DKTHTCPPCPAPEAAG | GGGSEGG | EVQLLESGGG | GGGGSG | DIQMTQSPS |
| | QLQLEHLLLD | GGGSGG | APSVFLFPPKPKDTLM | GSEGGGS | LVQPGGSLRL | GGGSGG | SLSASVGDR |
| | LQMILNGINN | GGS | ISRTPEVTCVVVDVSH | E (SEQ | SCAASGFTFS | GGSGGG | VTITCRASQ |
| | YKNPKLTRML | (SEQ | EDPEVKFNWYVDGVEV | ID NO: | SYWMHWVRQA | GS | SISSSLAWY |
| | TFKFYMPKKA | ID NO: | HNAKTKPREEQYNSTY | 1546) | PGKGLEWVSY | (SEQ | QQKPGKAPK |
| | TELKHLQCLE | 30) | RVVSVLTVLHQDWLNG | | ISGSGGYTNY | ID NO: | LLIYAASSL |
| | EELKPLEEAL | | KEYKCKVSNKALPAPI | | ADSVKGRFTI | 22) | QSGVPSRFS |
| | NLAPSKNFHL | | EKTISKAKGQPREPQV | | SRDNSKNTLY | | GSGSGTDFT |
| | RPRDLISDIN | | YTLPPSREEMTKNQVS | | LQMNSLRAED | | LTISSLQPE |
| | VIVLELKGSE | | LTCLVKGFYPSDIAVE | | TAVYYCARDR | | DFATYYCQQ |
| | TTFMCEYADE | | WESNGQPENNYKTTPP | | PYYYDIDVWG | | YKSYPVTFG |
| | TATIVEFINR | | VLDSDGSFFLYSKLTV | | KGTTVTVSS | | QGTKVEIK |
| | WITFSQSIIS | | DKSRWQQGNVFSCSVM | | (SEQ ID | | (SEQ ID |
| | TLT (SEQ | | HEALHNHYTQKSLSLS | | NO: 1477) | | NO: 1367) |
| | ID NO: 41) | | PG (SEQ ID NO: | | | | |
| | | | 21) | | | | |
| MIAB220 | APTSSSTKKT | GGGGSG | DKTHTCPPCPAPEAAG | GGGSEGG | EVQLLESGGG | GGGGSG | DIQMTQSPS |
| | QLQLEHLLLD | GGGSGG | APSVFLFPPKPKDTLM | GSEGGGS | LVQPGGSLRL | GGGSGG | SLSASVGDR |
| | LQMILNGINN | GGS | ISRTPEVTCVVVDVSH | E (SEQ | SCAASGFTFS | GGSGGG | VTITCRASQ |
| | YKNPKLTRML | (SEQ | EDPEVKFNWYVDGVEV | ID NO: | SYWMHWVRQA | GS | SISSSLAWY |
| | TFKFYMPKKA | ID NO: | HNAKTKPREEQYNSTY | 1546) | PGKGLEWVSY | (SEQ | QQKPGKAPK |
| | TELKHLQCLE | 30) | RVVSVLTVLHQDWLNG | | ISGSGGYTNY | ID NO: | LLIYAASSL |
| | EELKPLEEAL | | KEYKCKVSNKALPAPI | | ADSVKGRFTI | 22) | QSGVPSRFS |
| | NLAPSKNFHL | | EKTISKAKGQPREPQV | | SRDNSKNTLY | | GSGSGTDFT |
| | RPRDLISDIN | | YTLPPSREEMTKNQVS | | LQMNSLRAED | | LTISSLQPE |
| | VIVLELKGSE | | LTCLVKGFYPSDIAVE | | TAVYYCARDR | | DFATYYCQQ |
| | TTFMCEYADE | | WESNGQPENNYKTTPP | | PYYYDLDVWG | | YKSYPVTFG |
| | TATIVEFINR | | VLDSDGSFFLYSKLTV | | KGTTVTVSS | | QGTKVEIK |
| | WITFSQSIIS | | DKSRWQQGNVFSCSVM | | (SEQ ID | | (SEQ ID |
| | TLT (SEQ | | HEALHNHYTQKSLSLS | | NO: 1480) | | NO: 1367) |
| | ID NO: 41) | | PG (SEQ ID NO: | | | | |
| | | | 21) | | | | |
| MIAB221 | APTSSSTKKT | GGGGSG | DKTHTCPPCPAPEAAG | GGGSEGG | EVQLLESGGG | GGGGSG | DIQMTQSPS |
| | QLQLEHLLLD | GGGSGG | APSVFLFPPKPKDTLM | GSEGGGS | LVQPGGSLRL | GGGSGG | SLSASVGDR |
| | LQMILNGINN | GGS | ISRTPEVTCVVVDVSH | E (SEQ | SCAASGFTFS | GGSGGG | VTITCRASQ |
| | YKNPKLTRML | (SEQ | EDPEVKFNWYVDGVEV | ID NO: | SYWMHWVRQA | GS | SISSSLAWY |
| | TFKFYMPKKA | ID NO: | HNAKTKPREEQYNSTY | 1546) | PGKCLEWVSY | (SEQ | QQKPGKAPK |
| | TELKHLQCLE | 30) | RVVSVLTVLHQDWLNG | | ISGSGGYTNY | ID NO: | LLIYAASSL |
| | EELKPLEEAL | | KEYKCKVSNKALPAPI | | ADSVKGRFTI | 22) | QSGVPSRFS |
| | NLAPSKNFHL | | EKTISKAKGQPREPQV | | SRDNSKNTLY | | GSGSGTDFT |
| | RPRDLISDIN | | YTLPPSREEMTKNQVS | | LQMNSLRAED | | LTISSLQPE |
| | VIVLELKGSE | | LTCLVKGFYPSDIAVE | | TAVYYCARDR | | DFATYYCQQ |
| | TTFMCEYADE | | WESNGQPENNYKTTPP | | PYYYDMDVWG | | YKSYPVTFG |
| | TATIVEFINR | | VLDSDGSFFLYSKLTV | | KGTTVTVSS | | CGTKVEIK |
| | WITFSQSIIS | | DKSRWQQGNVFSCSVM | | (SEQ ID | | (SEQ ID |
| | TLT (SEQ | | HEALHNHYTQKSLSLS | | NO: 1542) | | NO: 1543) |
| | ID NO: 41) | | PG (SEQ ID NO: | | | | |
| | | | 21) | | | | |
| MIAB222 | APTSSSTKKT | GGGGSG | DKTHTCPPCPAPEAAG | GGGSEGG | EVQLLESGGG | GGGGSG | DIQMTQSPS |
| | QLQLEHLLLD | GGGSGG | APSVFLFPPKPKDTLM | GSEGGGS | LVQPGGSLRL | GGGSGG | SLSASVGDR |
| | LQMILNGINN | GGS | ISRTPEVTCVVVDVSH | E (SEQ | SCAASGFTFS | GGSGGG | VTITCRASQ |
| | YKNPKLTRML | (SEQ | EDPEVKFNWYVDGVEV | ID NO: | SYWMHWVRQA | GS | SISSSLAWY |
| | TFKFYMPKKA | ID NO: | HNAKTKPREEQYNSTY | 1546) | PGKCLEWVSY | (SEQ | QQKPGKAPK |
| | TELKHLQCLE | 30) | RVVSVLTVLHQDWLNG | | ISGSGGYTNY | ID NO: | LLIYAASSL |
| | EELKPLEEAL | | KEYKCKVSNKALPAPI | | ADSVKGRFTI | 22) | QSGVPSRFS |
| | NLAPSKNFHL | | EKTISKAKGQPREPQV | | SRDNSKNTLY | | GSGSGTDFT |
| | RPRDLISDIN | | YTLPPSREEMTKNQVS | | LQMNSLRAED | | LTISSLQPE |
| | VIVLELKGSE | | LTCLVKGFYPSDIAVE | | TAVYYCARDR | | DFATYYCQQ |
| | TTFMCEYADE | | WESNGQPENNYKTTPP | | PYYYDIDVWG | | YKSYPVTFG |
| | TATIVEFINR | | VLDSDGSFFLYSKLTV | | KGTTVTVSS | | CGTKVEIK |
| | WITFSQSIIS | | DKSRWQQGNVFSCSVM | | (SEQ ID | | (SEQ ID |
| | TLT (SEQ | | HEALHNHYTQKSLSLS | | NO: 1544) | | NO: 1543) |
| | ID NO: 41) | | PG (SEQ ID NO: | | | | |
| | | | 21) | | | | |
| MIAB223 | APTSSSTKKT | GGGGSG | DKTHTCPPCPAPEAAG | GGGSEGG | EVQLLESGGG | GGGGSG | DIQMTQSPS |
| | QLQLEHLLLD | GGGSGG | APSVFLFPPKPKDTLM | GSEGGGS | LVQPGGSLRL | GGGSGG | SLSASVGDR |
| | LQMILNGINN | GGS | ISRTPEVTCVVVDVSH | E (SEQ | SCAASGFTFS | GGSGGG | VTITCRASQ |
| | YKNPKLTRML | (SEQ | EDPEVKFNWYVDGVEV | ID NO: | SYWMHWVRQA | GS | SISSSLAWY |
| | TFKFYMPKKA | ID NO: | HNAKTKPREEQYNSTY | 1546) | PGKCLEWVSY | (SEQ | QQKPGKAPK |
| | TELKHLQCLE | 30) | RVVSVLTVLHQDWLNG | | ISGSGGYTNY | ID NO: | LLIYAASSL |
| | EELKPLEEAL | | KEYKCKVSNKALPAPI | | ADSVKGRFTI | 22) | QSGVPSRFS |
| | NLAPSKNFHL | | EKTISKAKGQPREPQV | | SRDNSKNTLY | | GSGSGTDFT |
| | RPRDLISDIN | | YTLPPSREEMTKNQVS | | LQMNSLRAED | | LTISSLQPE |
| | VIVLELKGSE | | LTCLVKGFYPSDIAVE | | TAVYYCARDR | | DFATYYCQQ |
| | TTFMCEYADE | | WESNGQPENNYKTTPP | | PYYYDLDVWG | | YKSYPVTFG |
| | TATIVEFINR | | VLDSDGSFFLYSKLTV | | KGTTVTVSS | | CGTKVEIK |
| | WITFSQSIIS | | DKSRWQQGNVFSCSVM | | (SEQ ID | | (SEQ ID |
| | TLT (SEQ | | HEALHNHYTQKSLSLS | | NO: 1545) | | NO: 1543) |
| | ID NO: 41) | | PG (SEQ ID NO: | | | | |
| | | | 21) | | | | |
| MIAB224 | APTSSSTKKT | GGGGSG | DKTHTCPPCPAPEAAG | GGGGSGG | EVQLLESGGG | GGGGSG | DIQMTQSPS |
| | QLQLEHLLLD | GGGSGG | APSVFLFPPKPKDTLM | GGSGGGG | LVQPGGSLRL | GGGSGG | SLSASVGDR |
| | LQMILNGINN | GGSGGG | ISRTPEVTCVVVDVSH | S (SEQ | SCAASGFTFS | GGSGGG | VTITCRASQ |
| | YKNPKLTRML | GS | EDPEVKFNWYVDGVEV | ID NO: | SYWMHWVRQA | GS | SISSSLAWY |
| | TFKFYMPKKA | (SEQ | HNAKTKPREEQYNSTY | 30) | PGKGLEWVSY | (SEQ | QQKPGKAPK |
| | TELKHLQCLE | ID NO: | RVVSVLTVLHQDWLNG | | ISGSGGYTNY | ID NO: | LLIYAASSL |
| | EELKPLEEAL | 22) | KEYKCKVSNKALPAPI | | ADSVKGRFTI | 22) | QSGVPSRFS |
| | NLAPSKNFHL | | EKTISKAKGQPREPQV | | SRDNSKNTLY | | GSGSGTDFT |
| | RPRDLISDIN | | YTLPPSREEMTKNQVS | | LQMNSLRAED | | LTISSLQPE |
| | VIVLELKGSE | | LTCLVKGFYPSDIAVE | | TAVYYCARDR | | DFATYYCQQ |
| | TTFMCEYADE | | WESNGQPENNYKTTPP | | PYYYDMDVWG | | YKSYPVTFG |
| | TATIVEFINR | | VLDSDGSFFLYSKLTV | | KGTTVTVSS | | QGTKVEIK |
| | WITFSQSIIS | | DKSRWQQGNVFSCSVM | | (SEQ ID | | (SEQ ID |
| | TLT (SEQ | | HEALHNHYTQKSLSLS | | NO: 1445) | | NO: 1367) |
| | ID NO: 41) | | PG (SEQ ID NO: | | | | |
| | | | 21) | | | | |
| MIAB225 | APTSSSTKKT | GGGGSG | DKTHTCPPCPAPEAAG | GGGGSGG | EVQLLESGGG | GGGGSG | DIQMTQSPS |
| | QLQLEHLLLD | GGGSGG | APSVFLFPPKPKDTLM | GGSGGGG | LVQPGGSLRL | GGGSGG | SLSASVGDR |
| | LQMILNGINN | GGSGGG | ISRTPEVTCVVVDVSH | S (SEQ | SCAASGFTFS | GGSGGG | VTITCRASQ |
| | YKNPKLTRML | GS | EDPEVKFNWYVDGVEV | ID NO: | SYWMHWVRQA | GS | SISSSLAWY |
| | TFKFYMPKKA | (SEQ | HNAKTKPREEQYNSTY | 30) | PGKGLEWVSY | (SEQ | QQKPGKAPK |
| | TELKHLQCLE | ID NO: | RVVSVLTVLHQDWLNG | | ISGSGGYTNY | ID NO: | LLIYAASSL |
| | EELKPLEEAL | 22) | KEYKCKVSNKALPAPI | | ADSVKGRFTI | 22) | QSGVPSRFS |
| | NLAPSKNFHL | | EKTISKAKGQPREPQV | | SRDNSKNTLY | | GSGSGTDFT |
| | RPRDLISDIN | | YTLPPSREEMTKNQVS | | LQMNSLRAED | | LTISSLQPE |
| | VIVLELKGSE | | LTCLVKGFYPSDIAVE | | TAVYYCARDR | | DFATYYCQQ |
| | TTFMCEYADE | | WESNGQPENNYKTTPP | | PYYYDIDVWG | | YKSYPVTFG |
| | TATIVEFINR | | VLDSDGSFFLYSKLTV | | KGTTVTVSS | | QGTKVEIK |
| | WITFSQSIIS | | DKSRWQQGNVFSCSVM | | (SEQ ID | | (SEQ ID |
| | TLT (SEQ | | HEALHNHYTQKSLSLS | | NO: 1477) | | NO: 1367) |
| | ID NO: 41) | | PG (SEQ ID NO: | | | | |
| | | | 21) | | | | |
| MIAB226 | APTSSSTKKT | GGGGSG | DKTHTCPPCPAPEAAG | GGGGSGG | EVQLLESGGG | GGGGSG | DIQMTQSPS |
| | QLQLEHLLLD | GGGSGG | APSVFLFPPKPKDTLM | GGSGGGG | LVQPGGSLRL | GGGSGG | SLSASVGDR |
| | LQMILNGINN | GGSGGG | ISRTPEVTCVVVDVSH | S (SEQ | SCAASGFTFS | GGSGGG | VTITCRASQ |
| | YKNPKLTRML | GS | EDPEVKFNWYVDGVEV | ID NO: | SYWMHWVRQA | GS | SISSSLAWY |
| | TFKFYMPKKA | (SEQ | HNAKTKPREEQYNSTY | 30) | PGKGLEWVSY | (SEQ | QQKPGKAPK |
| | TELKHLQCLE | ID NO: | RVVSVLTVLHQDWLNG | | ISGSGGYTNY | ID NO: | LLIYAASSL |
| | EELKPLEEAL | 22) | KEYKCKVSNKALPAPI | | ADSVKGRFTI | 22) | QSGVPSRFS |
| | NLAPSKNFHL | | EKTISKAKGQPREPQV | | SRDNSKNTLY | | GSGSGTDFT |
| | RPRDLISDIN | | YTLPPSREEMTKNQVS | | LQMNSLRAED | | LTISSLQPE |
| | VIVLELKGSE | | LTCLVKGFYPSDIAVE | | TAVYYCARDR | | DFATYYCQQ |
| | TTEMCEYADE | | WESNGQPENNYKTTPP | | PYYYDLDVWG | | YKSYPVTFG |
| | TATIVEFINR | | VLDSDGSFFLYSKLTV | | KGTTVTVSS | | QGTKVEIK |
| | WITFSQSIIS | | DKSRWQQGNVFSCSVM | | (SEQ ID | | (SEQ ID |
| | TLT (SEQ | | HEALHNHYTQKSLSLS | | NO: 1480) | | NO: 1367) |
| | ID NO: 41) | | PG (SEQ ID NO: | | | | |
| | | | 21) | | | | |
| MIAB227 | APTSSSTKKT | GGGGSG | DKTHTCPPCPAPEAAG | GGGGSGG | EVQLLESGGG | GGGGSG | DIQMTQSPS |
| | QLQLEHLLLD | GGGSGG | APSVFLFPPKPKDTLM | GGSGGGG | LVQPGGSLRL | GGGSGG | SLSASVGDR |
| | LQMILNGINN | GGSGGG | ISRTPEVTCVVVDVSH | S (SEQ | SCAASGFTFS | GGSGGG | VTITCRASQ |
| | YKNPKLTRML | GS | EDPEVKFNWYVDGVEV | ID NO: | SYWMHWVRQA | GS | SISSSLAWY |
| | TFKFYMPKKA | (SEQ | HNAKTKPREEQYNSTY | 30) | PGKCLEWVSY | (SEQ | QQKPGKAPK |
| | TELKHLQCLE | ID NO: | RVVSVLTVLHQDWLNG | | ISGSGGYTNY | ID NO: | LLIYAASSL |
| | EELKPLEEAL | 22) | KEYKCKVSNKALPAPI | | ADSVKGRFTI | 22) | QSGVPSRFS |
| | NLAPSKNFHL | | EKTISKAKGQPREPQV | | SRDNSKNTLY | | GSGSGTDFT |
| | RPRDLISDIN | | YTLPPSREEMTKNQVS | | LQMNSLRAED | | LTISSLQPE |
| | VIVLELKGSE | | LTCLVKGFYPSDIAVE | | TAVYYCARDR | | DFATYYCQQ |
| | TTEMCEYADE | | WESNGQPENNYKTTPP | | PYYYDMDVWG | | YKSYPVTFG |
| | TATIVEFINR | | VLDSDGSFFLYSKLTV | | KGTTVTVSS | | CGTKVEIK |
| | WITFSQSIIS | | DKSRWQQGNVFSCSVM | | (SEQ ID | | (SEQ ID |
| | TLT (SEQ | | HEALHNHYTQKSLSLS | | NO: 1542) | | NO: 1543) |
| | ID NO: 41) | | PG (SEQ ID NO: | | | | |
| | | | 21) | | | | |
| MIAB228 | APTSSSTKKT | GGGGSG | DKTHTCPPCPAPEAAG | GGGGSGG | EVQLLESGGG | GGGGSG | DIQMTQSPS |
| | QLQLEHLLLD | GGGSGG | APSVFLFPPKPKDTLM | GGSGGGG | LVQPGGSLRL | GGGSGG | SLSASVGDR |
| | LQMILNGINN | GGSGGG | ISRTPEVTCVVVDVSH | S (SEQ | SCAASGFTFS | GGSGGG | VTITCRASQ |
| | YKNPKLTRML | GS | EDPEVKFNWYVDGVEV | ID NO: | SYWMHWVRQA | GS | SISSSLAWY |
| | TFKFYMPKKA | (SEQ | HNAKTKPREEQYNSTY | 30) | PGKCLEWVSY | (SEQ | QQKPGKAPK |
| | TELKHLQCLE | ID NO: | RVVSVLTVLHQDWLNG | | ISGSGGYTNY | ID NO: | LLIYAASSL |
| | EELKPLEEAL | 22) | KEYKCKVSNKALPAPI | | ADSVKGRFTI | 22) | QSGVPSRFS |
| | NLAPSKNFHL | | EKTISKAKGQPREPQV | | SRDNSKNTLY | | GSGSGTDFT |
| | RPRDLISDIN | | YTLPPSREEMTKNQVS | | LQMNSLRAED | | LTISSLQPE |
| | VIVLELKGSE | | LTCLVKGFYPSDIAVE | | TAVYYCARDR | | DFATYYCQQ |
| | TTFMCEYADE | | WESNGQPENNYKTTPP | | PYYYDIDVWG | | YKSYPVTFG |
| | TATIVEFINR | | VLDSDGSFFLYSKLTV | | KGTTVTVSS | | CGTKVEIK |
| | WITFSQSIIS | | DKSRWQQGNVFSCSVM | | (SEQ ID | | (SEQ ID |
| | TLT (SEQ | | HEALHNHYTQKSLSLS | | NO: 1544) | | NO: 1543) |
| | ID NO: 41) | | PG (SEQ ID NO: | | | | |
| | | | 21) | | | | |
| MIAB229 | APTSSSTKKT | GGGGSG | DKTHTCPPCPAPEAAG | GGGGSGG | EVQLLESGGG | GGGGSG | DIQMTQSPS |
| | QLQLEHLLLD | GGGSGG | APSVFLFPPKPKDTLM | GGSGGGG | LVQPGGSLRL | GGGSGG | SLSASVGDR |
| | LQMILNGINN | GGSGGG | ISRTPEVTCVVVDVSH | S (SEQ | SCAASGFTFS | GGSGGG | VTITCRASQ |
| | YKNPKLTRML | GS | EDPEVKFNWYVDGVEV | ID NO: | SYWMHWVRQA | GS | SISSSLAWY |
| | TFKFYMPKKA | (SEQ | HNAKTKPREEQYNSTY | 30) | PGKCLEWVSY | (SEQ | QQKPGKAPK |
| | TELKHLQCLE | ID NO: | RVVSVLTVLHQDWLNG | | ISGSGGYTNY | ID NO: | LLIYAASSL |
| | EELKPLEEAL | 22) | KEYKCKVSNKALPAPI | | ADSVKGRFTI | 22) | QSGVPSRFS |
| | NLAPSKNFHL | | EKTISKAKGQPREPQV | | SRDNSKNTLY | | GSGSGTDFT |
| | RPRDLISDIN | | YTLPPSREEMTKNQVS | | LQMNSLRAED | | LTISSLQPE |
| | VIVLELKGSE | | LTCLVKGFYPSDIAVE | | TAVYYCARDR | | DFATYYCQQ |
| | TTFMCEYADE | | WESNGQPENNYKTTPP | | PYYYDLDVWG | | YKSYPVTFG |
| | TATIVEFINR | | VLDSDGSFFLYSKLTV | | KGTTVTVSS | | CGTKVEIK |
| | WITFSQSIIS | | DKSRWQQGNVFSCSVM | | (SEQ ID | | (SEQ ID |
| | TLT (SEQ | | HEALHNHYTQKSLSLS | | NO: 1545) | | NO: 1543) |
| | ID NO: 41) | | PG (SEQ ID NO: | | | | |
| | | | 21) | | | | |
| MIAB230 | APTSSSTKKT | GGGGSG | DKTHTCPPCPAPEAAG | GGGSEGG | EVQLLESGGG | GGGGSG | DIQMTQSPS |
| | QLQLEHLLLD | GGGSGG | APSVFLFPPKPKDTLM | GSEGGGS | LVQPGGSLRL | GGGSGG | SLSASVGDR |
| | LQMILNGINN | GGSGGG | ISRTPEVTCVVVDVSH | E (SEQ | SCAASGFTFS | GGSGGG | VTITCRASQ |
| | YKNPKLTRML | GS | EDPEVKFNWYVDGVEV | ID NO: | SYWMHWVRQA | GS | SISSSLAWY |
| | TFKFYMPKKA | (SEQ | HNAKTKPREEQYNSTY | 1546) | PGKGLEWVSY | (SEQ | QQKPGKAPK |
| | TELKHLQCLE | ID NO: | RVVSVLTVLHQDWLNG | | ISGSGGYTNY | ID NO: | LLIYAASSL |
| | EELKPLEEAL | 22) | KEYKCKVSNKALPAPI | | ADSVKGRFTI | 22) | QSGVPSRFS |
| | NLAPSKNFHL | | EKTISKAKGQPREPQV | | SRDNSKNTLY | | GSGSGTDFT |
| | RPRDLISDIN | | YTLPPSREEMTKNQVS | | LQMNSLRAED | | LTISSLQPE |
| | VIVLELKGSE | | LTCLVKGFYPSDIAVE | | TAVYYCARDR | | DFATYYCQQ |
| | TTEMCEYADE | | WESNGQPENNYKTTPP | | PYYYDMDVWG | | YKSYPVTFG |
| | TATIVEFINR | | VLDSDGSFFLYSKLTV | | KGTTVTVSS | | QGTKVEIK |
| | WITFSQSIIS | | DKSRWQQGNVFSCSVM | | (SEQ ID | | (SEQ ID |
| | TLT (SEQ | | HEALHNHYTQKSLSLS | | NO: 1445) | | NO: 1367) |
| | ID NO: 41) | | PG (SEQ ID NO: | | | | |
| | | | 21) | | | | |
| MIAB231 | APTSSSTKKT | GGGGSG | DKTHTCPPCPAPEAAG | GGGSEGG | EVQLLESGGG | GGGGSG | DIQMTQSPS |
| | QLQLEHLLLD | GGGSGG | APSVFLFPPKPKDTLM | GSEGGGS | LVQPGGSLRL | GGGSGG | SLSASVGDR |
| | LQMILNGINN | GGSGGG | ISRTPEVTCVVVDVSH | E (SEQ | SCAASGFTFS | GGSGGG | VTITCRASQ |
| | YKNPKLTRML | GS | EDPEVKFNWYVDGVEV | ID NO: | SYWMHWVRQA | GS | SISSSLAWY |
| | TFKFYMPKKA | (SEQ | HNAKTKPREEQYNSTY | 1546) | PGKGLEWVSY | (SEQ | QQKPGKAPK |
| | TELKHLQCLE | ID NO: | RVVSVLTVLHQDWLNG | | ISGSGGYTNY | ID NO: | LLIYAASSL |
| | EELKPLEEAL | 22) | KEYKCKVSNKALPAPI | | ADSVKGRFTI | 22) | QSGVPSRFS |
| | NLAPSKNFHL | | EKTISKAKGQPREPQV | | SRDNSKNTLY | | GSGSGTDFT |
| | RPRDLISDIN | | YTLPPSREEMTKNQVS | | LQMNSLRAED | | LTISSLQPE |
| | VIVLELKGSE | | LTCLVKGFYPSDIAVE | | TAVYYCARDR | | DFATYYCQQ |
| | TTEMCEYADE | | WESNGQPENNYKTTPP | | PYYYDIDVWG | | YKSYPVTFG |
| | TATIVEFINR | | VLDSDGSFFLYSKLTV | | KGTTVTVSS | | QGTKVEIK |
| | WITFSQSIIS | | DKSRWQQGNVFSCSVM | | (SEQ ID | | (SEQ ID |
| | TLT (SEQ | | HEALHNHYTQKSLSLS | | NO: 1477) | | NO: 1367) |
| | ID NO: 41) | | PG (SEQ ID NO: | | | | |
| | | | 21) | | | | |
| MIAB232 | APTSSSTKKT | GGGGSG | DKTHTCPPCPAPEAAG | GGGSEGG | EVQLLESGGG | GGGGSG | DIQMTQSPS |
| | QLQLEHLLLD | GGGSGG | APSVFLFPPKPKDTLM | GSEGGGS | LVQPGGSLRL | GGGSGG | SLSASVGDR |
| | LQMILNGINN | GGSGGG | ISRTPEVTCVVVDVSH | E (SEQ | SCAASGFTFS | GGSGGG | VTITCRASQ |
| | YKNPKLTRML | GS | EDPEVKFNWYVDGVEV | ID NO: | SYWMHWVRQA | GS | SISSSLAWY |
| | TFKFYMPKKA | (SEQ | HNAKTKPREEQYNSTY | 1546) | PGKGLEWVSY | (SEQ | QQKPGKAPK |
| | TELKHLQCLE | ID NO: | RVVSVLTVLHQDWLNG | | ISGSGGYTNY | ID NO: | LLIYAASSL |
| | EELKPLEEAL | 22) | KEYKCKVSNKALPAPI | | ADSVKGRFTI | 22) | QSGVPSRFS |
| | NLAPSKNFHL | | EKTISKAKGQPREPQV | | SRDNSKNTLY | | GSGSGTDFT |
| | RPRDLISDIN | | YTLPPSREEMTKNQVS | | LQMNSLRAED | | LTISSLQPE |
| | VIVLELKGSE | | LTCLVKGFYPSDIAVE | | TAVYYCARDR | | DFATYYCQQ |
| | TTEMCEYADE | | WESNGQPENNYKTTPP | | PYYYDLDVWG | | YKSYPVTFG |
| | TATIVEFINR | | VLDSDGSFFLYSKLTV | | KGTTVTVSS | | QGTKVEIK |
| | WITFSQSIIS | | DKSRWQQGNVFSCSVM | | (SEQ ID | | (SEQ ID |
| | TLT (SEQ | | HEALHNHYTQKSLSLS | | NO: 1480) | | NO: 1367) |
| | ID NO: 41) | | PG (SEQ ID NO: | | | | |
| | | | 21) | | | | |
| MIAB233 | APTSSSTKKT | GGGGSG | DKTHTCPPCPAPEAAG | GGGSEGG | EVQLLESGGG | GGGGSG | DIQMTQSPS |
| | QLQLEHLLLD | GGGSGG | APSVFLFPPKPKDTLM | GSEGGGS | LVQPGGSLRL | GGGSGG | SLSASVGDR |
| | LQMILNGINN | GGSGGG | ISRTPEVTCVVVDVSH | E (SEQ | SCAASGFTFS | GGSGGG | VTITCRASQ |
| | YKNPKLTRML | GS | EDPEVKFNWYVDGVEV | ID NO: | SYWMHWVRQA | GS | SISSSLAWY |
| | TFKFYMPKKA | (SEQ | HNAKTKPREEQYNSTY | 1546) | PGKCLEWVSY | (SEQ | QQKPGKAPK |
| | TELKHLQCLE | ID NO: | RVVSVLTVLHQDWLNG | | ISGSGGYTNY | ID NO: | LLIYAASSL |
| | EELKPLEEAL | 22) | KEYKCKVSNKALPAPI | | ADSVKGRFTI | 22) | QSGVPSRFS |
| | NLAPSKNFHL | | EKTISKAKGQPREPQV | | SRDNSKNTLY | | GSGSGTDFT |
| | RPRDLISDIN | | YTLPPSREEMTKNQVS | | LQMNSLRAED | | LTISSLQPE |
| | VIVLELKGSE | | LTCLVKGFYPSDIAVE | | TAVYYCARDR | | DFATYYCQQ |
| | TTEMCEYADE | | WESNGQPENNYKTTPP | | PYYYDMDVWG | | YKSYPVTFG |
| | TATIVEFINR | | VLDSDGSFFLYSKLTV | | KGTTVTVSS | | CGTKVEIK |
| | WITFSQSIIS | | DKSRWQQGNVFSCSVM | | (SEQ ID | | (SEQ ID |
| | TLT (SEQ | | HEALHNHYTQKSLSLS | | NO: 1542) | | NO: 1543) |
| | ID NO: 41) | | PG (SEQ ID NO: | | | | |
| | | | 21) | | | | |
| MIAB234 | APTSSSTKKT | GGGGSG | DKTHTCPPCPAPEAAG | GGGSEGG | EVQLLESGGG | GGGGSG | DIQMTQSPS |
| | QLQLEHLLLD | GGGSGG | APSVFLFPPKPKDTLM | GSEGGGS | LVQPGGSLRL | GGGSGG | SLSASVGDR |
| | LQMILNGINN | GGSGGG | ISRTPEVTCVVVDVSH | E (SEQ | SCAASGFTFS | GGSGGG | VTITCRASQ |
| | YKNPKLTRML | GS | EDPEVKFNWYVDGVEV | ID NO: | SYWMHWVRQA | GS | SISSSLAWY |
| | TFKFYMPKKA | (SEQ | HNAKTKPREEQYNSTY | 1546) | PGKCLEWVSY | (SEQ | QQKPGKAPK |
| | TELKHLQCLE | ID NO: | RVVSVLTVLHQDWLNG | | ISGSGGYTNY | ID NO: | LLIYAASSL |
| | EELKPLEEAL | 22) | KEYKCKVSNKALPAPI | | ADSVKGRFTI | 22) | QSGVPSRFS |
| | NLAPSKNFHL | | EKTISKAKGQPREPQV | | SRDNSKNTLY | | GSGSGTDFT |
| | RPRDLISDIN | | YTLPPSREEMTKNQVS | | LQMNSLRAED | | LTISSLQPE |
| | VIVLELKGSE | | LTCLVKGFYPSDIAVE | | TAVYYCARDR | | DFATYYCQQ |
| | TTEMCEYADE | | WESNGQPENNYKTTPP | | PYYYDIDVWG | | YKSYPVTFG |
| | TATIVEFINR | | VLDSDGSFFLYSKLTV | | KGTTVTVSS | | CGTKVEIK |
| | WITFSQSIIS | | DKSRWQQGNVFSCSVM | | (SEQ ID | | (SEQ ID |
| | TLT (SEQ | | HEALHNHYTQKSLSLS | | NO: 1544) | | NO: 1543) |
| | ID NO: 41) | | PG (SEQ ID NO: | | | | |
| | | | 21) | | | | |
| MIAB235 | APTSSSTKKT | GGGGSG | DKTHTCPPCPAPEAAG | GGGSEGG | EVQLLESGGG | GGGGSG | DIQMTQSPS |
| | QLQLEHLLLD | GGGSGG | APSVFLFPPKPKDTLM | GSEGGGS | LVQPGGSLRL | GGGSGG | SLSASVGDR |
| | LQMILNGINN | GGSGGG | ISRTPEVTCVVVDVSH | E (SEQ | SCAASGFTFS | GGSGGG | VTITCRASQ |
| | YKNPKLTRML | GS | EDPEVKFNWYVDGVEV | ID NO: | SYWMHWVRQA | GS | SISSSLAWY |
| | TFKFYMPKKA | (SEQ | HNAKTKPREEQYNSTY | 1546) | PGKCLEWVSY | (SEQ | QQKPGKAPK |
| | TELKHLQCLE | ID NO: | RVVSVLTVLHQDWING | | ISGSGGYTNY | ID NO: | LLIYAASSL |
| | EELKPLEEAL | 22) | KEYKCKVSNKALPAPI | | ADSVKGRFTI | 22) | QSGVPSRFS |
| | NLAPSKNFHL | | EKTISKAKGQPREPQV | | SRDNSKNTLY | | GSGSGTDFT |
| | RPRDLISDIN | | YTLPPSREEMTKNQVS | | LQMNSLRAED | | LTISSLQPE |
| | VIVLELKGSE | | LTCLVKGFYPSDIAVE | | TAVYYCARDR | | DFATYYCQQ |
| | TTFMCEYADE | | WESNGQPENNYKTTPP | | PYYYDLDVWG | | YKSYPVTFG |
| | TATIVEFINR | | VLDSDGSFFLYSKLTV | | KGTTVTVSS | | CGTKVEIK |
| | WITFSQSIIS | | DKSRWQQGNVFSCSVM | | (SEQ ID | | (SEQ ID |
| | TLT (SEQ | | HEALHNHYTQKSLSLS | | NO: 1545) | | NO: 1543) |
| | ID NO: 41) | | PG (SEQ ID NO: | | | | |
| | | | 21) | | | | |

[0355] In some embodiments, the MAdCAM antibody comprises one or more sequences, or a combination thereof, of the sequences presented in Table 11.

[0356] In some embodiments, the polypeptide is referred to as an antibody or antigen binding protein.

[0357] In some embodiments, as provided for herein, the MAdCAM antibody, or binding fragment thereof, is linked directly or indirectly to a PD-1 antibody or binding fragment thereof.

[0358] In some embodiments, as provided for herein, the MAdCAM antibody, or binding fragment thereof, is linked directly or indirectly to an IL-2 mutein or binding fragment thereof. The IL-2 mutein can be any mutein as provided for herein or other IL-2 muteins known to one of skill in the art.

[0359] In some embodiments, if the therapeutic compound comprises a Fc portion, the Fc domain, (portion) bears mutations to render the Fc region “effectorless,” that is unable to bind FcRs. The mutations that render Fc regions effectorless are known. In some embodiments, the mutations in the Fc region, which is according to the known numbering system, are selected from the group consisting of K322A, L234A, L235A, G237A, L234F, L235E, N297, P331S, or any combination thereof. In some embodiments, the Fc mutations comprises a mutation at L234 and/or L235 and/or G237. In some embodiments, the Fc mutations comprise L234A and/or L235A mutations, which can be referred to as LALA mutations. In some embodiments, the Fc mutations comprise L234A, L235A, and G237A mutations.

[0360] Disclosed herein are Linker Region polypeptides, therapeutic peptides, and nucleic acids encoding the polypeptides (e.g. therapeutic compounds), vectors comprising the nucleic acid sequences, and cells comprising the nucleic acids or vectors

[0361] Therapeutic compounds can comprise a plurality of specific targeting moieties. In some embodiments, the therapeutic compound comprises a plurality one specific targeting moiety, a plurality of copies of a donor specific targeting moiety or a plurality of tissue specific targeting moieties. In some embodiments, a therapeutic compound comprises a first and a second donor specific targeting moiety, e.g., a first donor specific targeting moiety specific for a first donor target and a second donor specific targeting moiety specific for a second donor target, e.g., wherein the first and second target are found on the same donor tissue. In some embodiments, the therapeutic compound comprises e.g., a first specific targeting moiety for a tissue specific target and a second specific targeting moiety for a second target, e.g., wherein the first and second target are found on the same or different target tissue.

[0362] In some embodiments, a therapeutic compound comprises a plurality of effector binding/modulating moieties each comprising an ICIM binding/modulating moiety, the number of ICIM binding/modulating moieties is sufficiently low that clustering of the ICIM binding/modulating moiety's ligand on immune cells (in the absence of target binding) is minimized, e.g., to avoid systemic agonizing of immune cells in the absence of binding of the therapeutic compound to target.

[0363] In some embodiments, the therapeutic compound has the formula from N-terminus to C-terminus:
[0364] A1-Linker A-A2-Linker B-A3
[0365] A3-Linker A-A2-Linker B-A1,
   wherein,
[0366] A1 and A3, each independently comprises an effector binding/modulating moiety, e.g., an ICIM binding/modulating moiety, an IIC binding/modulating moiety, ICSM binding/modulating moiety, or an SM binding/modulating moiety; or a specific targeting moiety,
[0367] A2 comprises an Fc region or is absent; and
[0368] Linker A and Linker B, each are independent linkers.

[0369] In some embodiments,
[0370] A1 comprises an IL-2 mutein molecule,
[0371] A3 comprises a specific targeting moiety, e.g. anti-human MAdCAM Ab, such as a scFv,
[0372] A2 comprises an Fc region, and

[0373] Linker A and Linker B, each are independent linkers further comprising glycine/serine linkers.

[0374] In some embodiments, a polypeptide is provided, wherein the polypeptide comprises a peptide of the formula

[0375] Ab-ConstantDomain-LinkerA-IL2Mutein-LinkerB-FcRegion, wherein the Ab is a variable heavy chain domain that binds to MAdCAM, the Constant domain is an Ig constant domain such as IgG1, IgG2, IgG3, or IgG4, Linker A is a linker, such as those provided herein, and the IL2Mutein is an IL-2 mutein, such as those provided for herein. In some embodiments, the variable heavy domain is a variable heavy chain domain as illustrated in Table 7. In some embodiments, the variable heavy chain domain comprises the variable heavy chain domain of Clone ID: 6, 75, or 79 of Table 7; MIAB197 of Table 9, or MIAB204 of Table 11. In some embodiments, the variable heavy chain domain comprises the CDRs of the heavy domain of 6, 75, or 79 of Table 7; or MIAB197 of Table 9. In some embodiments, the VH comprises a sequence of SEQ ID NO: 414, SEQ ID NO: 591, SEQ ID NO: 599, and SEQ ID NO: 1387.

[0376] In some embodiments, the ConstantDomain comprises a IgG1 constant domain, such as those provided for herein. In some embodiments, the constant domain comprises mutations to render the constant region “effectorless,” that is unable to bind FcRs. The mutations that render constant regions effectorless are known. In some embodiments, the mutations in the constant region, which is according to the known numbering system, are selected from the group consisting of: K322A, L234A, L235A, G237A, L234F, L235E, N297, P331S, or any combination thereof. In some embodiments, the constant region mutations comprises a mutation at L234 and/or L235 and/or G237. In some embodiments, the constant region mutations comprise L234A and/or L235A mutations, which can be referred to as LALA mutations. In some embodiments, the constant region mutations comprise L234A, L235A, and G237A mutations. In some embodiments, the ConstantDomain comprises SEQ ID NO: 44.

[0377] In some embodiments, the MAdCAM antibody is selected from the following table:

TABLE 15

| Clone | | scFv VK | | | | | | |
|---|---|---|---|---|---|---|---|---|
| (scFv) | scFv VH Seq | Seq | HCDR1 | HCDR2 | HCDR3 | LCDR1 | LCDR2 | LCDR3 |
| MIAB212 | EVQLLESGGGL | DIQMTQSPSS | FTFSS | SYISG | CARDR | RASQSI | SSLQS | QQYKSY |
| | VQPGGSLRLSC | LSASVGDRVT | YWMH | SGGYT | PYYYD | SSSLA | (SEQ | PVT |
| | AASGFTFSSYW | ITCRASQSIS | (SEQ | NYA | MDVW | (SEQ | ID NO: | (SEQ |
| | MHWVRQAPGKG | SSLAWYQQKP | ID | (SEQ | (SEQ | ID NO: | 1497) | ID NO: |
| | LEWVSYISGSG | GKAPKLLIYA | NO: | ID | ID | 1502) | | 1498) |
| | GYTNYADSVKG | ASSLQSGVPS | 1499) | NO: | NO: | | | |
| | RFTISRDNSKN | RFSGSGSGTD | | 1506) | 1507) | | | |
| | TLYLQMNSLRA | FTLTISSLQP | | | | | | |
| | EDTAVYYCARD | EDFATYYCQQ | | | | | | |
| | RPYYYDMDVWG | YKSYPVTFGQ | | | | | | |
| | KGTTVTVSS | GTKVEIK | | | | | | |
| | (SEQ ID NO: | (SEQ ID | | | | | | |
| | 1445) | NO: 1367) | | | | | | |
| MIAB213 | EVQLLESGGGL | DIQMTQSPSS | FTFSS | SYISG | CARDR | RASQSI | SSLQS | QQYKSY |
| | VQPGGSLRLSC | LSASVGDRVT | YWMH | SGGYT | PYYYD | SSSLA | (SEQ | PVT |
| | AASGFTFSSYW | ITCRASQSIS | (SEQ | NYA | IDVW | (SEQ | ID NO: | (SEQ |
| | MHWVRQAPGKG | SSLAWYQQKP | ID | (SEQ | (SEQ | ID NO: | 1497) | ID NO: |
| | LEWVSYISGSG | GKAPKLLIYA | NO: | ID | ID | 1502) | | 1498) |
| | GYTNYADSVKG | ASSLQSGVPS | 1499) | NO: | NO: | | | |
| | RFTISRDNSKN | RFSGSGSGTD | | 1506) | 1531) | | | |
| | TLYLQMNSLRA | FTLTISSLQP | | | | | | |
| | EDTAVYYCARD | EDFATYYCQQ | | | | | | |
| | RPYYYDIDVWG | YKSYPVTFGQ | | | | | | |
| | KGTTVTVSS | GTKVEIK | | | | | | |
| | (SEQ ID NO: | (SEQ ID | | | | | | |
| | 1477) | NO: 1367) | | | | | | |
| MIAB214 | EVQLLESGGGL | DIQMTQSPSS | FTFSS | SYISG | CARDR | RASQSI | SSLQS | QQYKSY |
| | VQPGGSLRLSC | LSASVGDRVT | YWMH | SGGYT | PYYYD | SSSLA | (SEQ | PVT |
| | AASGFTFSSYW | ITCRASQSIS | (SEQ | NYA | LDVW | (SEQ | ID NO: | (SEQ |
| | MHWVRQAPGKG | SSLAWYQQKP | ID | (SEQ | (SEQ | ID NO: | 1497) | ID NO: |
| | LEWVSYISGSG | GKAPKLLIYA | NO: | ID | ID | 1502) | | 1498) |
| | GYTNYADSVKG | ASSLQSGVPS | 1499) | NO: | NO: | | | |
| | RFTISRDNSKN | RFSGSGSGTD | | 1506) | 1532) | | | |
| | TLYLQMNSLRA | FTLTISSLQP | | | | | | |
| | EDTAVYYCARD | EDFATYYCQQ | | | | | | |
| | RPYYYDLDVWG | YKSYPVTFGQ | | | | | | |
| | KGTTVTVSS | GTKVEIK | | | | | | |
| | (SEQ ID NO: | (SEQ ID | | | | | | |
| | 1480) | NO: 1367) | | | | | | |

[0378] Alternative CDR notations for the MAdCAM antibody are also provided for in Table 14 for the same heavy and light chain variable domains.

[0379] In some embodiments, the variable heavy chain domain comprises a first CDR of SEQ ID NO: 90, a second CDR of SEQ ID NO: 91, and a third CDR of SEQ ID NO: 92. In some embodiments, the variable heavy chain domain comprises a first CDR of SEQ ID NO: 359, a second CDR of SEQ ID NO: 170, and a third CDR of SEQ ID NO: 360. In some embodiments, the variable heavy chain domain comprises a first CDR of SEQ ID NO: 135, a second CDR of SEQ ID NO: 381, and a third CDR of SEQ ID NO: 382. In some embodiments, the variable heavy chain domain comprises a first CDR of SEQ ID NO: 359, a second CDR of SEQ ID NO: 170, and a third CDR of SEQ ID NO: 1431. These are illustrative only and the CDR sets as set forth herein and in the tables are also provided.

[0380] In some embodiments, the LinkerA is a glycine/serine linker, which can be any glycine/serine linker provided for herein. In some embodiments, the linker is a sequence of GGGGSGGGGSGGGGSGGGGS (SEQ ID NO: 22) or GGGGSGGGGSGGGGS (SEQ ID NO: 30). These are non-limiting examples and the linker can have varying number of GGGGS (SEQ ID NO: 23) or GGGGA repeats (SEQ ID NO: 29), or a mixture of the two. In some embodiments, the linker comprises 1, 2, 3, 4, 5, 6, 7, 8, 9, or 10 of the GGGGS (SEQ ID NO: 23) and/or GGGGA (SEQ ID NO: 29) repeats (repeats disclosed as SEQ ID NOs: 1750 and 1748, respectively, in order of appearance). In some embodiments, the linker is 10 amino acids in length. In some embodiments, the linker is 5 amino acids in length. In some embodiments, the linker is 15 amino acids in length. In some embodiments, the linker is 20 amino acids in length. In some embodiments, the linker is 25 amino acids in length. In some embodiments, the linker is 30 amino acids in length. In some embodiments, the linker is 35 amino acids in length. In some embodiments, the linker is from 5-50 amino acids in length.

[0381] In some embodiments, the IL-2 mutein comprises a sequence of SEQ ID NO: 31. In some embodiments, the IL-2 mutein comprises a sequence of SEQ ID NO: 32. In some embodiments, the IL-2 mutein comprises a sequence of SEQ ID NO: 33. In some embodiments, the IL-2 mutein comprises a sequence of SEQ ID NO: 34. In some embodiments, the IL-2 mutein comprises a sequence of SEQ ID NO: 35. In some embodiments, the IL-2 mutein comprises a sequence of SEQ ID NO: 36. In some embodiments, the IL-2 mutein comprises a sequence of SEQ ID NO: 37. In some embodiments, the IL-2 mutein comprises a sequence of SEQ ID NO: 38. In some embodiments, the IL-2 mutein comprises a sequence of SEQ ID NO: 39. In some embodiments, the IL-2 mutein comprises a sequence of SEQ ID NO: 40. In some embodiments, the IL-2 mutein comprises a sequence of SEQ ID NO: 41. In some embodiments, the IL-2 mutein further comprises a T3A substitution (mutation). In some embodiments, the Fc Region comprises a peptide having a sequence of SEQ ID NO: 21. In some embodiments, the Fc Region comprises a peptide having a sequence of SEQ ID NO: 28. In some embodiments, the C-terminus of the Fc Region is linked to the N-terminus or the C-terminus of the variable heavy chain or IL-2 mutein. In some embodiments, the linker linking the Fc Region to the variable heavy chain or the IL-2 mutein is a glycine/serine or a glycine/alanine linker. In some embodiments, the linker linking the Fc region to the C- or N-terminus of the variable heavy chain or IL-2 mutein is a glycine/serine linker, which can be a sequence of GGGGSGGGGSGGGGSGGGGS (SEQ ID NO: 22) or GGGGSGGGGSGGGGS (SEQ ID NO: 30). These are non-limiting examples and the linker can have varying number of GGGGS (SEQ ID NO: 23) or GGGGA (SEQ ID NO: 29) repeats (repeats disclosed as SEQ ID NOs: 1750 and 1748, respectively, in order of appearance), or a mixture of the two. In some embodiments, the linker comprises 1, 2, 3, 4, 5, 6, 7, 8, 9, or 10 of the GGGGS (SEQ ID NO: 23) and/or GGGGA (SEQ ID NO: 29) repeats. In some embodiments, the linker is 10 amino acids in length. In some embodiments, the linker is 5 amino acids in length. In some embodiments, the linker is 15 amino acids in length. In some embodiments, the linker is 20 amino acids in length. In some embodiments, the linker is 25 amino acids in length. In some embodiments, the linker is 30 amino acids in length. In some embodiments, the linker is 35 amino acids in length. In some embodiments, the linker is from 5-50 amino acids in length.

[0382] In some embodiments, the polypeptide further comprises a polypeptide of formula VL-ConstantDomainLight, wherein VL is a variable light chain and ConstantDomainLight is a IgG light chain constant domain, wherein the polypeptide can be or is associated with the polypeptide having the formula of Ab-ConstantDomain-LinkerA-IL2Mutein-LinkerB-FcRegion. In some embodiments, the VL comprises one or any sequence of Table 7, Table 9, or Table 12.

[0383] In some embodiments, the constant domain also comprises mutations to negate the effector function, such as those provided for herein. In some embodiments, the ConstantDomainLight comprises a sequence of:

(SEQ ID NO: 45)
RTVAAPSVFIFPPSDEQLKSGTASVVCLLNNFYPREAKVQWKVDNALQSG
NSQESVTEQDSKDSTYSLSSTLTLSKADYEKHKVYACEVTHQGLSSPVTK
SFNRGEC

[0384] The different polypeptides of formula IL2Mutein-LinkerA-FcRegion-LinkerB-Ab and VL-ConstantDomainLight can be interchanged with one another.

[0385] In some embodiments, compounds are provided comprising the following formula, from N-terminus to C-terminus:

[0386] IL2Mutein-LinkerA-FcRegion-LinkerB-Ab, wherein the IL2Mutein is any IL-2 mutein that can, for example, preferentially activate Tregs; the LinkerA and Linker B are, each, independently, a linker as provided herein, the Fc Region can any one of such as provided herein, and the Ab is a tissue targeting moiety, such as those provided herein. In some embodiments, the Ab is an antibody that binds to MAdCAM or another cell surface target as provided herein. In some embodiments, the antibody is in a scFV format. In some embodiments, the antibody in scFV format is an antibody as provided in the Table 6 or Table 14. In some embodiments, the antibody in scFV format is an antibody that comprises the CDRs as set forth in Table 6, Table 7, Table 11, or Table 14.

[0387] In some embodiments, the C-terminus of the IL-2 mutein is linked to the N-terminus of the Fc region. In some embodiments, the linkage is direct or through a linker, such as those described herein. In some embodiments, the linker is a glycine/serine linker. In some embodiments, the linker linking the IL-2 mutein to the Fc region is a glycine/serine linker. In some embodiments, the glycine/serine linker comprises or consists of a sequence of GGGGSGGGGSGGGGSGGGGS (SEQ ID NO: 22) or GGGGSGGGGSGGGGS (SEQ ID NO: 30). These are non-limiting examples and the linker can have varying number of GGGGS (SEQ ID NO: 23) or GGGGA (SEQ ID NO: 29) repeats, or a mixture of the two. In some embodiments, the linker comprises 1, 2, 3, 4, 5, 6, 7, 8, 9, or 10 of the GGGGS (SEQ ID NO: 23) and/or GGGGA (SEQ ID NO: 29) repeats (repeats disclosed as SEQ ID NOs: 1750 and 1748, respectively, in order of appearance). In some embodiments, the linker is 10 amino acids in length. In some embodiments, the linker is 5 amino acids in length. In some embodiments, the linker is 15 amino acids in length. In some embodiments, the linker is 20 amino acids in length. In some embodiments, the linker is 25 amino acids in length. In some embodiments, the linker is 30 amino acids in length. In some embodiments, the linker is 35 amino acids in length. In some embodiments, the linker is from 5-50 amino acids in length.

[0388] In some embodiments, the IL-2 mutein comprises a sequence of SEQ ID NO: 31. In some embodiments, the IL-2 mutein comprises a sequence of SEQ ID NO: 32. In some embodiments, the IL-2 mutein comprises a sequence of SEQ ID NO: 33. In some embodiments, the IL-2 mutein comprises a sequence of SEQ ID NO: 34. In some embodiments, the IL-2 mutein comprises a sequence of SEQ ID NO: 35. In some embodiments, the IL-2 mutein comprises a sequence of SEQ ID NO: 36. In some embodiments, the IL-2 mutein comprises a sequence of SEQ ID NO: 37. In some embodiments, the IL-2 mutein comprises a sequence of SEQ ID NO: 38. In some embodiments, the IL-2 mutein comprises a sequence of SEQ ID NO: 39. In some embodiments, the IL-2 mutein comprises a sequence of SEQ ID NO: 40. In some embodiments, the IL-2 mutein comprises a sequence of SEQ ID NO: 41. In some embodiments, the IL-2 mutein further comprises a T3A substitution (mutation). In some embodiments, the Fc Region comprises a peptide having a sequence of SEQ ID NO: 21. In some embodiments, the Fc Region comprises a peptide having a sequence of SEQ ID NO: 28. In some embodiments, the C-terminus of the Fc Region is linked to the N-terminus of the variable heavy chain. In some embodiments, the linker linking the Fc Region to the variable heavy chain is a glycine/serine or a glycine/alanine linker. In some embodiments, the linker linking the Fc region to the N-terminus of the variable heavy chain is a glycine/serine linker, which can be a sequence of GGGGSGGGGSGGGGSGGGGS (SEQ ID NO: 22) or GGGGSGGGGSGGGGS (SEQ ID NO: 30). These are non-limiting examples and the linker can have varying number of GGGGS (SEQ ID NO: 23) or GGGGA (SEQ ID NO: 29) repeats, or a mixture of the two. In some embodiments, the linker comprises 1, 2, 3, 4, 5, 6, 7, 8, 9, or 10 of the GGGGS (SEQ ID NO: 23) and/or GGGGA (SEQ ID NO: 29) repeats (repeats disclosed as SEQ ID NOs: 1750 and 1748, respectively, in order of appearance). In some embodiments, the linker is 10 amino acids in length. In some embodiments, the linker is 5 amino acids in length. In some embodiments, the linker is 15 amino acids in length. In some embodiments, the linker is 20 amino acids in length. In some embodiments, the linker is 25 amino acids in length. In some embodiments, the linker is 30 amino acids in length. In some embodiments, the linker is 35 amino acids in length. In some embodiments, the linker is from 5-50 amino acids in length.

[0389] In some embodiments, the variable heavy chain comprises the CDRs as set forth in Table 6, Table 7, Table 9, or Table 14. In some embodiments, the variable heavy chain comprises a HCDR1, HCDR2, and a HCDR3, wherein the HCDR1, HCDR2, and a HCDR3 are as set forth in Table 6, Table 7, Table 9, or Table 14. In some embodiments, the variable heavy chain has a HCDR1, HCDR2, and a HCDR3 as set forth for Clone 1 in Table 6. In some embodiments, the variable heavy chain has a HCDR1, HCDR2, and a HCDR3 as set forth for Clone 2 in Table 6. In some embodiments, the variable heavy chain has a HCDR1, HCDR2, and a HCDR3 as set forth for Clone 3 in Table 6. In some embodiments, the variable heavy chain has a HCDR1, HCDR2, and a HCDR3 as set forth for Clone 4 in Table 6. In some embodiments, the variable heavy chain has a HCDR1, HCDR2, and a HCDR3 as set forth for Clone 5 in Table 6. In some embodiments, the variable heavy chain has a HCDR1, HCDR2, and a HCDR3 as set forth for Clone 6 in Table 6. In some embodiments, the variable heavy chain has a HCDR1, HCDR2, and a HCDR3 as set forth for Clone 7 in Table 6. In some embodiments, the variable heavy chain has a HCDR1, HCDR2, and a HCDR3 as set forth for Clone 8 in Table 6. In some embodiments, the variable heavy chain has a HCDR1, HCDR2, and a HCDR3 as set forth for Clone 9 in Table 6. In some embodiments, the variable heavy chain has a HCDR1, HCDR2, and a HCDR3 as set forth for Clone 10 in Table 6. In some embodiments, the variable heavy chain has a HCDR1, HCDR2, and a HCDR3 as set forth for Clone 11 in Table 6. In some embodiments, the variable heavy chain has a HCDR1, HCDR2, and a HCDR3 as set forth for Clone 12 in Table 6. In some embodiments, the variable heavy chain has a HCDR1, HCDR2, and a HCDR3 as set forth for Clone 13 in Table 6. In some embodiments, the variable heavy chain has a HCDR1, HCDR2, and a HCDR3 as set forth for Clone 14 in Table 6. In some embodiments, the variable heavy chain has a HCDR1, HCDR2, and a HCDR3 as set forth for Clone 15 in Table 6. In some embodiments, the variable heavy chain has a HCDR1, HCDR2, and a HCDR3 as set forth for Clone 16 in Table 6. In some embodiments, the variable heavy chain has a HCDR1, HCDR2, and a HCDR3 as set forth for Clone 17 in Table 6. In some embodiments, the variable heavy chain has a HCDR1, HCDR2, and a HCDR3 as set forth for Clone 1 in Table 6. In some embodiments, the variable heavy chain has a HCDR1, HCDR2, and a HCDR3 as set forth for Clone 18 in Table 6. In some embodiments, the variable heavy chain has a HCDR1, HCDR2, and a HCDR3 as set forth for Clone 19 in Table 6. In some embodiments, the variable heavy chain has a HCDR1, HCDR2, and a HCDR3 as set forth for Clone 20 in Table 6. In some embodiments, the variable heavy chain has a HCDR1, HCDR2, and a HCDR3 as set forth for Clone 21 in Table 6. In some embodiments, the variable heavy chain has a HCDR1, HCDR2, and a HCDR3 as set forth for Clone 22 in Table 6. In some embodiments, the variable heavy chain has a HCDR1, HCDR2, and a HCDR3 as set forth for Clone 23 in Table 6. In some embodiments, the variable heavy chain has a HCDR1, HCDR2, and a HCDR3 as set forth for Clone 24 in Table 6. In some embodiments, the variable heavy chain has a HCDR1, HCDR2, and a HCDR3 as set forth for Clone 25 in Table 6. In some embodiments, the variable heavy chain has a HCDR1, HCDR2, and a HCDR3 as set forth for Clone 26 in Table 6. In some embodiments, the variable heavy chain has a HCDR1, HCDR2, and a HCDR3 as set forth for Clone 27 in Table 6. In some embodiments, the variable heavy chain has a HCDR1, HCDR2, and a HCDR3 as set forth for Clone 28 in Table 6. In some embodiments, the variable heavy chain has a HCDR1, HCDR2, and a HCDR3 as set forth for Clone 29 in Table 6. In some embodiments, the variable heavy chain has a HCDR1, HCDR2, and a HCDR3 as set forth for Clone 30 in Table 6. In some embodiments, the variable heavy chain has a HCDR1, HCDR2, and a HCDR3 as set forth for Clone 31 in Table 6. In some embodiments, the variable heavy chain has a HCDR1, HCDR2, and a HCDR3 as set forth for Clone 32 in Table 6. In some embodiments, the variable heavy chain has a HCDR1, HCDR2, and a HCDR3 as set forth for Clone 33 in Table 6. In some embodiments, the variable heavy chain has a HCDR1, HCDR2, and a HCDR3 as set forth for Clone 34 in Table 6. In some embodiments, the variable heavy chain has a HCDR1, HCDR2, and a HCDR3 as set forth for Clone 35 in Table 6. In some embodiments, the variable heavy chain has a HCDR1, HCDR2, and a HCDR3 as set forth for Clone 36 in Table 6. In some embodiments, the variable heavy chain has a HCDR1, HCDR2, and a HCDR3 as set forth for Clone 37 in Table 6. In some embodiments, the variable heavy chain has a HCDR1, HCDR2, and a HCDR3 as set forth for Clone 38 in Table 6. In some embodiments, the variable heavy chain has a HCDR1, HCDR2, and a HCDR3 as set forth for Clone 39 in Table 6. In some embodiments, the variable heavy chain has a HCDR1, HCDR2, and a HCDR3 as set forth for Clone 40 in Table 6. In some embodiments, the variable heavy chain has a HCDR1, HCDR2, and a HCDR3 as set forth for Clone 41 in Table 6. In some embodiments, the variable heavy chain has a HCDR1, HCDR2, and a HCDR3 as set forth for Clone 42 in Table 6. In some embodiments, the variable heavy chain has a HCDR1, HCDR2, and a HCDR3 as set forth for Clone 43 in Table 6. In some embodiments, the variable heavy chain has a HCDR1, HCDR2, and a HCDR3 as set forth for Clone 44 in Table 6. In some embodiments, the variable heavy chain has a HCDR1, HCDR2, and a HCDR3 as set forth for Clone 45 in Table 6. In some embodiments, the variable heavy chain has a HCDR1, HCDR2, and a HCDR3 as set forth for Clone 46 in Table 6. In some embodiments, the variable heavy chain has a HCDR1, HCDR2, and a HCDR3 as set forth for Clone 47 in Table 6. In some embodiments, the variable heavy chain has a HCDR1, HCDR2, and a HCDR3 as set forth for Clone 48 in Table 6. In some embodiments, the variable heavy chain has a HCDR1, HCDR2, and a HCDR3 as set forth for Clone 49 in Table 6. In some embodiments, the variable heavy chain has a HCDR1, HCDR2, and a HCDR3 as set forth for Clone 50 in Table 6. In some embodiments, the variable heavy chain has a HCDR1, HCDR2, and a HCDR3 as set forth for Clone 51 in Table 6. In some embodiments, the variable heavy chain has a HCDR1, HCDR2, and a HCDR3 as set forth for Clone 52 in Table 6. In some embodiments, the variable heavy chain has a HCDR1, HCDR2, and a HCDR3 as set forth for Clone 53 in Table 6. In some embodiments, the variable heavy chain has a HCDR1, HCDR2, and a HCDR3 as set forth for Clone 54 in Table 6. In some embodiments, the variable heavy chain has a HCDR1, HCDR2, and a HCDR3 as set forth for Clone 55 in Table 6. In some embodiments, the variable heavy chain has a HCDR1, HCDR2, and a HCDR3 as set forth for Clone 56 in Table 6. In some embodiments, the variable heavy chain has a HCDR1, HCDR2, and a HCDR3 as set forth for Clone 57 in Table 6. In some embodiments, the variable heavy chain has a HCDR1, HCDR2, and a HCDR3 as set forth for Clone 58 in Table 6. In some embodiments, the variable heavy chain has a HCDR1, HCDR2, and a HCDR3 as set forth for Clone 59 in Table 6. In some embodiments, the variable heavy chain has a HCDR1, HCDR2, and a HCDR3 as set forth for Clone 60 in Table 6. In some embodiments, the variable heavy chain has a HCDR1, HCDR2, and a HCDR3 as set forth for Clone 61 in Table 6. In some embodiments, the variable heavy chain has a HCDR1, HCDR2, and a HCDR3 as set forth for Clone 62 in Table 6. In some embodiments, the variable heavy chain has a HCDR1, HCDR2, and a HCDR3 as set forth for Clone 63 in Table 6. In some embodiments, the variable heavy chain has a HCDR1, HCDR2, and a HCDR3 as set forth for Clone 64 in Table 6. In some embodiments, the variable heavy chain has a HCDR1, HCDR2, and a HCDR3 as set forth for Clone 65 in Table 6. In some embodiments, the variable heavy chain has a HCDR1, HCDR2, and a HCDR3 as set forth for Clone 66 in Table 6.

[0390] In some embodiments, the variable heavy chain has a HCDR1, HCDR2, and a HCDR3 as set forth for Clone 1 in Table 7. In some embodiments, the variable heavy chain has a HCDR1, HCDR2, and a HCDR3 as set forth for Clone 2 in Table 7. In some embodiments, the variable heavy chain has a HCDR1, HCDR2, and a HCDR3 as set forth for Clone 3 in Table 7. In some embodiments, the variable heavy chain has a HCDR1, HCDR2, and a HCDR3 as set forth for Clone 4 in Table 7. In some embodiments, the variable heavy chain has a HCDR1, HCDR2, and a HCDR3 as set forth for Clone 5 in Table 7. In some embodiments, the variable heavy chain has a HCDR1, HCDR2, and a HCDR3 as set forth for Clone 6 in Table 7. In some embodiments, the variable heavy chain has a HCDR1, HCDR2, and a HCDR3 as set forth for Clone 7 in Table 7. In some embodiments, the variable heavy chain has a HCDR1, HCDR2, and a HCDR3 as set forth for Clone 8 in Table 7. In some embodiments, the variable heavy chain has a HCDR1, HCDR2, and a HCDR3 as set forth for Clone 9 in Table 7. In some embodiments, the variable heavy chain has a HCDR1, HCDR2, and a HCDR3 as set forth for Clone 10 in Table 7. In some embodiments, the variable heavy chain has a HCDR1, HCDR2, and a HCDR3 as set forth for Clone 11 in Table 7. In some embodiments, the variable heavy chain has a HCDR1, HCDR2, and a HCDR3 as set forth for Clone 12 in Table 7. In some embodiments, the variable heavy chain has a HCDR1, HCDR2, and a HCDR3 as set forth for Clone 13 in Table 7. In some embodiments, the variable heavy chain has a HCDR1, HCDR2, and a HCDR3 as set forth for Clone 14 in Table 7. In some embodiments, the variable heavy chain has a HCDR1, HCDR2, and a HCDR3 as set forth for Clone 15 in Table 7. In some embodiments, the variable heavy chain has a HCDR1, HCDR2, and a HCDR3 as set forth for Clone 16 in Table 7. In some embodiments, the variable heavy chain has a HCDR1, HCDR2, and a HCDR3 as set forth for Clone 17 in Table 7. In some embodiments, the variable heavy chain has a HCDR1, HCDR2, and a HCDR3 as set forth for Clone 1 in Table 7. In some embodiments, the variable heavy chain has a HCDR1, HCDR2, and a HCDR3 as set forth for Clone 18 in Table 7. In some embodiments, the variable heavy chain has a HCDR1, HCDR2, and a HCDR3 as set forth for Clone 19 in Table 7. In some embodiments, the variable heavy chain has a HCDR1, HCDR2, and a HCDR3 as set forth for Clone 20 in Table 7. In some embodiments, the variable heavy chain has a HCDR1, HCDR2, and a HCDR3 as set forth for Clone 21 in Table 7. In some embodiments, the variable heavy chain has a HCDR1, HCDR2, and a HCDR3 as set forth for Clone 22 in Table 7. In some embodiments, the variable heavy chain has a HCDR1, HCDR2, and a HCDR3 as set forth for Clone 23 in Table 7. In some embodiments, the variable heavy chain has a HCDR1, HCDR2, and a HCDR3 as set forth for Clone 24 in Table 7. In some embodiments, the variable heavy chain has a HCDR1, HCDR2, and a HCDR3 as set forth for Clone 25 in Table 7. In some embodiments, the variable heavy chain has a HCDR1, HCDR2, and a HCDR3 as set forth for Clone 26 in Table 7. In some embodiments, the variable heavy chain has a HCDR1, HCDR2, and a HCDR3 as set forth for Clone 27 in Table 7. In some embodiments, the variable heavy chain has a HCDR1, HCDR2, and a HCDR3 as set forth for Clone 28 in Table 7. In some embodiments, the variable heavy chain has a HCDR1, HCDR2, and a HCDR3 as set forth for Clone 29 in Table 7. In some embodiments, the variable heavy chain has a HCDR1, HCDR2, and a HCDR3 as set forth for Clone 30 in Table 7. In some embodiments, the variable heavy chain has a HCDR1, HCDR2, and a HCDR3 as set forth for Clone 31 in Table 7. In some embodiments, the variable heavy chain has a HCDR1, HCDR2, and a HCDR3 as set forth for Clone 32 in Table 7. In some embodiments, the variable heavy chain has a HCDR1, HCDR2, and a HCDR3 as set forth for Clone 33 in Table 7. In some embodiments, the variable heavy chain has a HCDR1, HCDR2, and a HCDR3 as set forth for Clone 34 in Table 7. In some embodiments, the variable heavy chain has a HCDR1, HCDR2, and a HCDR3 as set forth for Clone 35 in Table 7. In some embodiments, the variable heavy chain has a HCDR1, HCDR2, and a HCDR3 as set forth for Clone 36 in Table 7. In some embodiments, the variable heavy chain has a HCDR1, HCDR2, and a HCDR3 as set forth for Clone 37 in Table 7. In some embodiments, the variable heavy chain has a HCDR1, HCDR2, and a HCDR3 as set forth for Clone 38 in Table 7. In some embodiments, the variable heavy chain has a HCDR1, HCDR2, and a HCDR3 as set forth for Clone 39 in Table 7. In some embodiments, the variable heavy chain has a HCDR1, HCDR2, and a HCDR3 as set forth for Clone 40 in Table 7. In some embodiments, the variable heavy chain has a HCDR1, HCDR2, and a HCDR3 as set forth for Clone 41 in Table 7. In some embodiments, the variable heavy chain has a HCDR1, HCDR2, and a HCDR3 as set forth for Clone 42 in Table 7. In some embodiments, the variable heavy chain has a HCDR1, HCDR2, and a HCDR3 as set forth for Clone 43 in Table 7. In some embodiments, the variable heavy chain has a HCDR1, HCDR2, and a HCDR3 as set forth for Clone 44 in Table 7. In some embodiments, the variable heavy chain has a HCDR1, HCDR2, and a HCDR3 as set forth for Clone 45 in Table 7. In some embodiments, the variable heavy chain has a HCDR1, HCDR2, and a HCDR3 as set forth for Clone 46 in Table 7. In some embodiments, the variable heavy chain has a HCDR1, HCDR2, and a HCDR3 as set forth for Clone 47 in Table 7. In some embodiments, the variable heavy chain has a HCDR1, HCDR2, and a HCDR3 as set forth for Clone 48 in Table 7. In some embodiments, the variable heavy chain has a HCDR1, HCDR2, and a HCDR3 as set forth for Clone 49 in Table 7. In some embodiments, the variable heavy chain has a HCDR1, HCDR2, and a HCDR3 as set forth for Clone 50 in Table 7. In some embodiments, the variable heavy chain has a HCDR1, HCDR2, and a HCDR3 as set forth for Clone 51 in Table 7. In some embodiments, the variable heavy chain has a HCDR1, HCDR2, and a HCDR3 as set forth for Clone 52 in Table 7. In some embodiments, the variable heavy chain has a HCDR1, HCDR2, and a HCDR3 as set forth for Clone 53 in Table 7. In some embodiments, the variable heavy chain has a HCDR1, HCDR2, and a HCDR3 as set forth for Clone 54 in Table 7. In some embodiments, the variable heavy chain has a HCDR1, HCDR2, and a HCDR3 as set forth for Clone 55 in Table 7. In some embodiments, the variable heavy chain has a HCDR1, HCDR2, and a HCDR3 as set forth for Clone 56 in Table 7. In some embodiments, the variable heavy chain has a HCDR1, HCDR2, and a HCDR3 as set forth for Clone 57 in Table 7. In some embodiments, the variable heavy chain has a HCDR1, HCDR2, and a HCDR3 as set forth for Clone 58 in Table 7. In some embodiments, the variable heavy chain has a HCDR1, HCDR2, and a HCDR3 as set forth for Clone 59 in Table 7. In some embodiments, the variable heavy chain has a HCDR1, HCDR2, and a HCDR3 as set forth for Clone 60 in Table 7. In some embodiments, the variable heavy chain has a HCDR1, HCDR2, and a HCDR3 as set forth for Clone 61 in Table 7. In some embodiments, the variable heavy chain has a HCDR1, HCDR2, and a HCDR3 as set forth for Clone 62 in Table 7. In some embodiments, the variable heavy chain has a HCDR1, HCDR2, and a HCDR3 as set forth for Clone 63 in Table 7. In some embodiments, the variable heavy chain has a HCDR1, HCDR2, and a HCDR3 as set forth for Clone 64 in Table 7. In some embodiments, the variable heavy chain has a HCDR1, HCDR2, and a HCDR3 as set forth for Clone 65 in Table 7. In some embodiments, the variable heavy chain has a HCDR1, HCDR2, and a HCDR3 as set forth for Clone 66 in Table 7. In some embodiments, the variable heavy chain has a HCDR1, HCDR2, and a HCDR3 as set forth for Clone 67 in Table 7. In some embodiments, the variable heavy chain has a HCDR1, HCDR2, and a HCDR3 as set forth for Clone 68 in Table 7. In some embodiments, the variable heavy chain has a HCDR1, HCDR2, and a HCDR3 as set forth for Clone 69 in Table 7. In some embodiments, the variable heavy chain has a HCDR1, HCDR2, and a HCDR3 as set forth for Clone 70 in Table 7. In some embodiments, the variable heavy chain has a HCDR1, HCDR2, and a HCDR3 as set forth for Clone 71 in Table 7. In some embodiments, the variable heavy chain has a HCDR1, HCDR2, and a HCDR3 as set forth for Clone 72 in Table 7. In some embodiments, the variable heavy chain has a HCDR1, HCDR2, and a HCDR3 as set forth for Clone 73 in Table 7. In some embodiments, the variable heavy chain has a HCDR1, HCDR2, and a HCDR3 as set forth for Clone 74 in Table 7. In some embodiments, the variable heavy chain has a HCDR1, HCDR2, and a HCDR3 as set forth for Clone 75 in Table 7. In some embodiments, the variable heavy chain has a HCDR1, HCDR2, and a HCDR3 as set forth for Clone 76 in Table 7. In some embodiments, the variable heavy chain has a HCDR1, HCDR2, and a HCDR3 as set forth for Clone 77 in Table 7. In some embodiments, the variable heavy chain has a HCDR1, HCDR2, and a HCDR3 as set forth for Clone 78 in Table 7. In some embodiments, the variable heavy chain has a HCDR1, HCDR2, and a HCDR3 as set forth for Clone 79 in Table 7. In some embodiments, the variable heavy chain has a HCDR1, HCDR2, and a HCDR3 as set forth for Clone 80 in Table 7. In some embodiments, the variable heavy chain has a HCDR1, HCDR2, and a HCDR3 as set forth for Clone 81 in Table 7. In some embodiments, the variable heavy chain has a HCDR1, HCDR2, and a HCDR3 as set forth for Clone 82 in Table 7. In some embodiments, the variable heavy chain has a HCDR1, HCDR2, and a HCDR3 as set forth for Clone 83 in Table 7. In some embodiments, the variable heavy chain has a HCDR1, HCDR2, and a HCDR3 as set forth for Clone 84 in Table 7.

[0391] In some embodiments, the variable heavy chain has a HCDR1, HCDR2, and a HCDR3 as set forth for MIAB128 in Table 9. In some embodiments, the variable heavy chain has a HCDR1, HCDR2, and a HCDR3 as set forth for MIAB128A in Table 9. In some embodiments, the variable heavy chain has a HCDR1, HCDR2, and a HCDR3 as set forth for MIAB129 in Table 9. In some embodiments, the variable heavy chain has a HCDR1, HCDR2, and a HCDR3 as set forth for MIAB130 in Table 9. In some embodiments, the variable heavy chain has a HCDR1, HCDR2, and a HCDR3 as set forth for MIAB131 in Table 9. In some embodiments, the variable heavy chain has a HCDR1, HCDR2, and a HCDR3 as set forth for MIAB132 in Table 9. In some embodiments, the variable heavy chain has a HCDR1, HCDR2, and a HCDR3 as set forth for MIAB133 in Table 9. In some embodiments, the variable heavy chain has a HCDR1, HCDR2, and a HCDR3 as set forth for MIAB134 in Table 9. In some embodiments, the variable heavy chain has a HCDR1, HCDR2, and a HCDR3 as set forth for MIAB135 in Table 9. In some embodiments, the variable heavy chain has a HCDR1, HCDR2, and a HCDR3 as set forth for MIAB136 in Table 9. In some embodiments, the variable heavy chain has a HCDR1, HCDR2, and a HCDR3 as set forth for MIAB137 in Table 9. In some embodiments, the variable heavy chain has a HCDR1, HCDR2, and a HCDR3 as set forth for MIAB138 in Table 9. In some embodiments, the variable heavy chain has a HCDR1, HCDR2, and a HCDR3 as set forth for MIAB139 in Table 9. In some embodiments, the variable heavy chain has a HCDR1, HCDR2, and a HCDR3 as set forth for MIAB140 in Table 9. In some embodiments, the variable heavy chain has a HCDR1, HCDR2, and a HCDR3 as set forth for MIAB141 in Table 9. In some embodiments, the variable heavy chain has a HCDR1, HCDR2, and a HCDR3 as set forth for MIAB142 in Table 9. In some embodiments, the variable heavy chain has a HCDR1, HCDR2, and a HCDR3 as set forth for MIAB143 in Table 9. In some embodiments, the variable heavy chain has a HCDR1, HCDR2, and a HCDR3 as set forth for MIAB144 in Table 9. In some embodiments, the variable heavy chain has a HCDR1, HCDR2, and a HCDR3 as set forth for MIAB145 in Table 9. In some embodiments, the variable heavy chain has a HCDR1, HCDR2, and a HCDR3 as set forth for MIAB146 in Table 9. In some embodiments, the variable heavy chain has a HCDR1, HCDR2, and a HCDR3 as set forth for MIAB147 in Table 9. In some embodiments, the variable heavy chain has a HCDR1, HCDR2, and a HCDR3 as set forth for MIAB148 in Table 9. In some embodiments, the variable heavy chain has a HCDR1, HCDR2, and a HCDR3 as set forth for MIAB149 in Table 9. In some embodiments, the variable heavy chain has a HCDR1, HCDR2, and a HCDR3 as set forth for MIAB150 in Table 9. In some embodiments, the variable heavy chain has a HCDR1, HCDR2, and a HCDR3 as set forth for MIAB151 in Table 9. In some embodiments, the variable heavy chain has a HCDR1, HCDR2, and a HCDR3 as set forth for MIAB152 in Table 9. In some embodiments, the variable heavy chain has a HCDR1, HCDR2, and a HCDR3 as set forth for MIAB153 in Table 9. In some embodiments, the variable heavy chain has a HCDR1, HCDR2, and a HCDR3 as set forth for MIAB154 in Table 9. In some embodiments, the variable heavy chain has a HCDR1, HCDR2, and a HCDR3 as set forth for MIAB155 in Table 9. In some embodiments, the variable heavy chain has a HCDR1, HCDR2, and a HCDR3 as set forth for MIAB156 in Table 9. In some embodiments, the variable heavy chain has a HCDR1, HCDR2, and a HCDR3 as set forth for MIAB157 in Table 9. In some embodiments, the variable heavy chain has a HCDR1, HCDR2, and a HCDR3 as set forth for MIAB158 in Table 9. In some embodiments, the variable heavy chain has a HCDR1, HCDR2, and a HCDR3 as set forth for MIAB159 in Table 9. In some embodiments, the variable heavy chain has a HCDR1, HCDR2, and a HCDR3 as set forth for MIAB160 in Table 9. In some embodiments, the variable heavy chain has a HCDR1, HCDR2, and a HCDR3 as set forth for MIAB161 in Table 9. In some embodiments, the variable heavy chain has a HCDR1, HCDR2, and a HCDR3 as set forth for MIAB162 in Table 9. In some embodiments, the variable heavy chain has a HCDR1, HCDR2, and a HCDR3 as set forth for MIAB163 in Table 9. In some embodiments, the variable heavy chain has a HCDR1, HCDR2, and a HCDR3 as set forth for MIAB164 in Table 9. In some embodiments, the variable heavy chain has a HCDR1, HCDR2, and a HCDR3 as set forth for MIAB165 in Table 9. In some embodiments, the variable heavy chain has a HCDR1, HCDR2, and a HCDR3 as set forth for MIAB166 in Table 9. In some embodiments, the variable heavy chain has a HCDR1, HCDR2, and a HCDR3 as set forth for MIAB167 in Table 9. In some embodiments, the variable heavy chain has a HCDR1, HCDR2, and a HCDR3 as set forth for MIAB168 in Table 9. In some embodiments, the variable heavy chain has a HCDR1, HCDR2, and a HCDR3 as set forth for MIAB169 in Table 9. In some embodiments, the variable heavy chain has a HCDR1, HCDR2, and a HCDR3 as set forth for MIAB170 in Table 9. In some embodiments, the variable heavy chain has a HCDR1, HCDR2, and a HCDR3 as set forth for MIAB171 in Table 9. In some embodiments, the variable heavy chain has a HCDR1, HCDR2, and a HCDR3 as set forth for MIAB172 in Table 9. In some embodiments, the variable heavy chain has a HCDR1, HCDR2, and a HCDR3 as set forth for MIAB173 in Table 9. In some embodiments, the variable heavy chain has a HCDR1, HCDR2, and a HCDR3 as set forth for MIAB174 in Table 9. In some embodiments, the variable heavy chain has a HCDR1, HCDR2, and a HCDR3 as set forth for MIAB175 in Table 9. In some embodiments, the variable heavy chain has a HCDR1, HCDR2, and a HCDR3 as set forth for MIAB176 in Table 9. In some embodiments, the variable heavy chain has a HCDR1, HCDR2, and a HCDR3 as set forth for MIAB177 in Table 9. In some embodiments, the variable heavy chain has a HCDR1, HCDR2, and a HCDR3 as set forth for MIAB178 in Table 9. In some embodiments, the variable heavy chain has a HCDR1, HCDR2, and a HCDR3 as set forth for MIAB179 in Table 9. In some embodiments, the variable heavy chain has a HCDR1, HCDR2, and a HCDR3 as set forth for MIAB180 in Table 9. In some embodiments, the variable heavy chain has a HCDR1, HCDR2, and a HCDR3 as set forth for MIAB181 in Table 9. In some embodiments, the variable heavy chain has a HCDR1, HCDR2, and a HCDR3 as set forth for MIAB182 in Table 9. In some embodiments, the variable heavy chain has a HCDR1, HCDR2, and a HCDR3 as set forth for MIAB183 in Table 9. In some embodiments, the variable heavy chain has a HCDR1, HCDR2, and a HCDR3 as set forth for MIAB184 in Table 9. In some embodiments, the variable heavy chain has a HCDR1, HCDR2, and a HCDR3 as set forth for MIAB185 in Table 9. In some embodiments, the variable heavy chain has a HCDR1, HCDR2, and a HCDR3 as set forth for MIAB186 in Table 9. In some embodiments, the variable heavy chain has a HCDR1, HCDR2, and a HCDR3 as set forth for MIAB187 in Table 9. In some embodiments, the variable heavy chain has a HCDR1, HCDR2, and a HCDR3 as set forth for MIAB188 in Table 9. In some embodiments, the variable heavy chain has a HCDR1, HCDR2, and a HCDR3 as set forth for MIAB189 in Table 9. In some embodiments, the variable heavy chain has a HCDR1, HCDR2, and a HCDR3 as set forth for MIAB190 in Table 9. In some embodiments, the variable heavy chain has a HCDR1, HCDR2, and a HCDR3 as set forth for MIAB191 in Table 9. In some embodiments, the variable heavy chain has a HCDR1, HCDR2, and a HCDR3 as set forth for MIAB192 in Table 9. In some embodiments, the variable heavy chain has a HCDR1, HCDR2, and a HCDR3 as set forth for MIAB193 in Table 9. In some embodiments, the variable heavy chain has a HCDR1, HCDR2, and a HCDR3 as set forth for MIAB194 in Table 9. In some embodiments, the variable heavy chain has a HCDR1, HCDR2, and a HCDR3 as set forth for MIAB195 in Table 9. In some embodiments, the variable heavy chain has a HCDR1, HCDR2, and a HCDR3 as set forth for MIAB196 in Table 9. In some embodiments, the variable heavy chain has a HCDR1, HCDR2, and a HCDR3 as set forth for MIAB197 in Table 9. In some embodiments, the variable heavy chain has a HCDR1, HCDR2, and a HCDR3 as set forth for MIAB198 in Table 9.

[0392] In some embodiments, the variable heavy chain has a HCDR1, HCDR2, and a HCDR3 as set forth for PMAB61 in Table 14. In some embodiments, the variable heavy chain has a HCDR1, HCDR2, and a HCDR3 as set forth for PMAB62 in Table 14. In some embodiments, the variable heavy chain has a HCDR1, HCDR2, and a HCDR3 as set forth for PMAB63 in Table 14. In some embodiments, the variable heavy chain has a HCDR1, HCDR2, and a HCDR3 as set forth for PMAB64 in Table 14. In some embodiments, the variable heavy chain has a HCDR1, HCDR2, and a HCDR3 as set forth for PMAB65 in Table 14. In some embodiments, the variable heavy chain has a HCDR1, HCDR2, and a HCDR3 as set forth for PMAB66 in Table 14. In some embodiments, the variable heavy chain has a HCDR1, HCDR2, and a HCDR3 as set forth for PMAB67 in Table 14. In some embodiments, the variable heavy chain has a HCDR1, HCDR2, and a HCDR3 as set forth for PMAB68 in Table 14.

[0393] In some embodiments, the variable heavy chain has a HCDR1, HCDR2, and a HCDR3 as set forth for MIAB212 in Table 15. In some embodiments, the variable heavy chain has a HCDR1, HCDR2, and a HCDR3 as set forth for MIAB213 in Table 15. In some embodiments, the variable heavy chain has a HCDR1, HCDR2, and a HCDR3 as set forth for MIAB214 in Table 15.

[0394] In some embodiments, the variable light chain has a LCDR1, LCDR2, and a LCDR3 as set forth for Clone 1 in Table 6. In some embodiments, the variable light chain has a LCDR1, LCDR2, and a LCDR3 as set forth for Clone 2 in Table 6. In some embodiments, the variable light chain has a LCDR1, LCDR2, and a LCDR3 as set forth for Clone 3 in Table 6. In some embodiments, the variable light chain has a LCDR1, LCDR2, and a LCDR3 as set forth for Clone 4 in Table 6. In some embodiments, the variable light chain has a LCDR1, LCDR2, and a LCDR3 as set forth for Clone 5 in Table 6. In some embodiments, the variable light chain has a LCDR1, LCDR2, and a LCDR3 as set forth for Clone 6 in Table 6. In some embodiments, the variable light chain has a LCDR1, LCDR2, and a LCDR3 as set forth for Clone 7 in Table 6. In some embodiments, the variable light chain has a LCDR1, LCDR2, and a LCDR3 as set forth for Clone 8 in Table 6. In some embodiments, the variable light chain has a LCDR1, LCDR2, and a LCDR3 as set forth for Clone 9 in Table 6. In some embodiments, the variable light chain has a LCDR1, LCDR2, and a LCDR3 as set forth for Clone 10 in Table 6. In some embodiments, the variable light chain has a LCDR1, LCDR2, and a LCDR3 as set forth for Clone 11 in Table 6. In some embodiments, the variable light chain has a LCDR1, LCDR2, and a LCDR3 as set forth for Clone 12 in Table 6. In some embodiments, the variable light chain has a LCDR1, LCDR2, and a LCDR3 as set forth for Clone 13 in Table 6. In some embodiments, the variable light chain has a LCDR1, LCDR2, and a LCDR3 as set forth for Clone 14 in Table 6. In some embodiments, the variable light chain has a LCDR1, LCDR2, and a LCDR3 as set forth for Clone 15 in Table 6. In some embodiments, the variable light chain has a LCDR1, LCDR2, and a LCDR3 as set forth for Clone 16 in Table 6. In some embodiments, the variable light chain has a LCDR1, LCDR2, and a LCDR3 as set forth for Clone 17 in Table 6. In some embodiments, the variable light chain has a LCDR1, LCDR2, and a LCDR3 as set forth for Clone 1 in Table 6. In some embodiments, the variable light chain has a LCDR1, LCDR2, and a LCDR3 as set forth for Clone 18 in Table 6. In some embodiments, the variable light chain has a LCDR1, LCDR2, and a LCDR3 as set forth for Clone 19 in Table 6. In some embodiments, the variable light chain has a LCDR1, LCDR2, and a LCDR3 as set forth for Clone 20 in Table 6. In some embodiments, the variable light chain has a LCDR1, LCDR2, and a LCDR3 as set forth for Clone 21 in Table 6. In some embodiments, the variable light chain has a LCDR1, LCDR2, and a LCDR3 as set forth for Clone 22 in Table 6. In some embodiments, the variable light chain has a LCDR1, LCDR2, and a LCDR3 as set forth for Clone 23 in Table 6. In some embodiments, the variable light chain has a LCDR1, LCDR2, and a LCDR3 as set forth for Clone 24 in Table 6. In some embodiments, the variable light chain has a LCDR1, LCDR2, and a LCDR3 as set forth for Clone 25 in Table 6. In some embodiments, the variable light chain has a LCDR1, LCDR2, and a LCDR3 as set forth for Clone 26 in Table 6. In some embodiments, the variable light chain has a LCDR1, LCDR2, and a LCDR3 as set forth for Clone 27 in Table 6. In some embodiments, the variable light chain has a LCDR1, LCDR2, and a LCDR3 as set forth for Clone 28 in Table 6. In some embodiments, the variable light chain has a LCDR1, LCDR2, and a LCDR3 as set forth for Clone 29 in Table 6. In some embodiments, the variable light chain has a LCDR1, LCDR2, and a LCDR3 as set forth for Clone 30 in Table 6. In some embodiments, the variable light chain has a LCDR1, LCDR2, and a LCDR3 as set forth for Clone 31 in Table 6. In some embodiments, the variable light chain has a LCDR1, LCDR2, and a LCDR3 as set forth for Clone 32 in Table 6. In some embodiments, the variable light chain has a LCDR1, LCDR2, and a LCDR3 as set forth for Clone 33 in Table 6. In some embodiments, the variable light chain has a LCDR1, LCDR2, and a LCDR3 as set forth for Clone 34 in Table 6. In some embodiments, the variable light chain has a LCDR1, LCDR2, and a LCDR3 as set forth for Clone 35 in Table 6. In some embodiments, the variable light chain has a LCDR1, LCDR2, and a LCDR3 as set forth for Clone 36 in Table 6. In some embodiments, the variable light chain has a LCDR1, LCDR2, and a LCDR3 as set forth for Clone 37 in Table 6. In some embodiments, the variable light chain has a LCDR1, LCDR2, and a LCDR3 as set forth for Clone 38 in Table 6. In some embodiments, the variable light chain has a LCDR1, LCDR2, and a LCDR3 as set forth for Clone 39 in Table 6. In some embodiments, the variable light chain has a LCDR1, LCDR2, and a LCDR3 as set forth for Clone 40 in Table 6. In some embodiments, the variable light chain has a LCDR1, LCDR2, and a LCDR3 as set forth for Clone 41 in Table 6. In some embodiments, the variable light chain has a LCDR1, LCDR2, and a LCDR3 as set forth for Clone 42 in Table 6. In some embodiments, the light heavy chain has a LCDR1, LCDR2, and a LCDR3 as set forth for Clone 43 in Table 6. In some embodiments, the variable light chain has a LCDR1, LCDR2, and a LCDR3 as set forth for Clone 44 in Table 6. In some embodiments, the variable light chain has a LCDR1, LCDR2, and a LCDR3 as set forth for Clone 45 in Table 6. In some embodiments, the variable light chain has a LCDR1, LCDR2, and a LCDR3 as set forth for Clone 46 in Table 6. In some embodiments, the variable light chain has a LCDR1, LCDR2, and a LCDR3 as set forth for Clone 47 in Table 6. In some embodiments, the variable light chain has a LCDR1, LCDR2, and a LCDR3 as set forth for Clone 48 in Table 6. In some embodiments, the variable light chain has a LCDR1, LCDR2, and a LCDR3 as set forth for Clone 49 in Table 6. In some embodiments, the variable light chain has a LCDR1, LCDR2, and a LCDR3 as set forth for Clone 50 in Table 6. In some embodiments, the variable light chain has a LCDR1, LCDR2, and a LCDR3 as set forth for Clone 51 in Table 6. In some embodiments, the variable light chain has a LCDR1, LCDR2, and a LCDR3 as set forth for Clone 52 in Table 6. In some embodiments, the variable light chain has a LCDR1, LCDR2, and a LCDR3 as set forth for Clone 53 in Table 6. In some embodiments, the variable light chain has a LCDR1, LCDR2, and a LCDR3 as set forth for Clone 54 in Table 6. In some embodiments, the variable light chain has a LCDR1, LCDR2, and a LCDR3 as set forth for Clone 55 in Table 6. In some embodiments, the variable light chain has a LCDR1, LCDR2, and a LCDR3 as set forth for Clone 56 in Table 6. In some embodiments, the variable light chain has a LCDR1, LCDR2, and a LCDR3 as set forth for Clone 57 in Table 6. In some embodiments, the variable light chain has a LCDR1, LCDR2, and a LCDR3 as set forth for Clone 58 in Table 6. In some embodiments, the variable light chain has a LCDR1, LCDR2, and a LCDR3 as set forth for Clone 59 in Table 6. In some embodiments, the variable light chain has a LCDR1, LCDR2, and a LCDR3 as set forth for Clone 60 in Table 6. In some embodiments, the variable light chain has a LCDR1, LCDR2, and a LCDR3 as set forth for Clone 61 in Table 6. In some embodiments, the variable light chain has a LCDR1, LCDR2, and a LCDR3 as set forth for Clone 62 in Table 6. In some embodiments, the variable light chain has a LCDR1, LCDR2, and a LCDR3 as set forth for Clone 63 in Table 6. In some embodiments, the variable light chain has a LCDR1, LCDR2, and a LCDR3 as set forth for Clone 64 in Table 6. In some embodiments, the variable light chain has a LCDR1, LCDR2, and a LCDR3 as set forth for Clone 65 in Table 6. In some embodiments, the variable light chain has a LCDR1, LCDR2, and a LCDR3 as set forth for Clone 66 in Table 6.

[0395] In some embodiments, the variable light chain has a LCDR1, LCDR2, and a LCDR3 as set forth for Clone 1 in Table 7. In some embodiments, the variable light chain has a LCDR1, LCDR2, and a LCDR3 as set forth for Clone 2 in Table 7. In some embodiments, the variable light chain has a LCDR1, LCDR2, and a LCDR3 as set forth for Clone 3 in Table 7. In some embodiments, the variable light chain has a LCDR1, LCDR2, and a LCDR3 as set forth for Clone 4 in Table 7. In some embodiments, the variable light chain has a LCDR1, LCDR2, and a LCDR3 as set forth for Clone 5 in Table 7. In some embodiments, the variable light chain has a LCDR1, LCDR2, and a LCDR3 as set forth for Clone 6 in Table 7. In some embodiments, the variable light chain has a LCDR1, LCDR2, and a LCDR3 as set forth for Clone 7 in Table 7. In some embodiments, the variable light chain has a LCDR1, LCDR2, and a LCDR3 as set forth for Clone 8 in Table 7. In some embodiments, the variable light chain has a LCDR1, LCDR2, and a LCDR3 as set forth for Clone 9 in Table 7. In some embodiments, the variable light chain has a LCDR1, LCDR2, and a LCDR3 as set forth for Clone 10 in Table 7. In some embodiments, the variable light chain has a LCDR1, LCDR2, and a LCDR3 as set forth for Clone 11 in Table 7. In some embodiments, the variable light chain has a LCDR1, LCDR2, and a LCDR3 as set forth for Clone 12 in Table 7. In some embodiments, the variable light chain has a LCDR1, LCDR2, and a LCDR3 as set forth for Clone 13 in Table 7. In some embodiments, the variable light chain has a LCDR1, LCDR2, and a LCDR3 as set forth for Clone 14 in Table 7. In some embodiments, the variable light chain has a LCDR1, LCDR2, and a LCDR3 as set forth for Clone 15 in Table 7. In some embodiments, the variable light chain has a LCDR1, LCDR2, and a LCDR3 as set forth for Clone 16 in Table 7. In some embodiments, the variable light chain has a LCDR1, LCDR2, and a LCDR3 as set forth for Clone 17 in Table 7. In some embodiments, the variable light chain has a LCDR1, LCDR2, and a LCDR3 as set forth for Clone 1 in Table 7. In some embodiments, the variable light chain has a LCDR1, LCDR2, and a LCDR3 as set forth for Clone 18 in Table 7. In some embodiments, the variable light chain has a LCDR1, LCDR2, and a LCDR3 as set forth for Clone 19 in Table 7. In some embodiments, the variable light chain has a LCDR1, LCDR2, and a LCDR3 as set forth for Clone 20 in Table 7. In some embodiments, the variable light chain has a LCDR1, LCDR2, and a LCDR3 as set forth for Clone 21 in Table 7. In some embodiments, the variable light chain has a LCDR1, LCDR2, and a LCDR3 as set forth for Clone 22 in Table 7. In some embodiments, the variable light chain has a LCDR1, LCDR2, and a LCDR3 as set forth for Clone 23 in Table 7. In some embodiments, the variable light chain has a LCDR1, LCDR2, and a LCDR3 as set forth for Clone 24 in Table 7. In some embodiments, the variable light chain has a LCDR1, LCDR2, and a LCDR3 as set forth for Clone 25 in Table 7. In some embodiments, the variable light chain has a LCDR1, LCDR2, and a LCDR3 as set forth for Clone 26 in Table 7. In some embodiments, the variable light chain has a LCDR1, LCDR2, and a LCDR3 as set forth for Clone 27 in Table 7. In some embodiments, the variable light chain has a LCDR1, LCDR2, and a LCDR3 as set forth for Clone 28 in Table 7. In some embodiments, the variable light chain has a LCDR1, LCDR2, and a LCDR3 as set forth for Clone 29 in Table 7. In some embodiments, the variable light chain has a LCDR1, LCDR2, and a LCDR3 as set forth for Clone 30 in Table 7. In some embodiments, the variable light chain has a LCDR1, LCDR2, and a LCDR3 as set forth for Clone 31 in Table 7. In some embodiments, the variable light chain has a LCDR1, LCDR2, and a LCDR3 as set forth for Clone 32 in Table 7. In some embodiments, the variable light chain has a LCDR1, LCDR2, and a LCDR3 as set forth for Clone 33 in Table 7. In some embodiments, the variable light chain has a LCDR1, LCDR2, and a LCDR3 as set forth for Clone 34 in Table 7. In some embodiments, the variable light chain has a LCDR1, LCDR2, and a LCDR3 as set forth for Clone 35 in Table 7. In some embodiments, the variable light chain has a LCDR1, LCDR2, and a LCDR3 as set forth for Clone 36 in Table 7. In some embodiments, the variable light chain has a LCDR1, LCDR2, and a LCDR3 as set forth for Clone 37 in Table 7. In some embodiments, the variable light chain has a LCDR1, LCDR2, and a LCDR3 as set forth for Clone 38 in Table 7. In some embodiments, the variable light chain has a LCDR1, LCDR2, and a LCDR3 as set forth for Clone 39 in Table 7. In some embodiments, the variable light chain has a LCDR1, LCDR2, and a LCDR3 as set forth for Clone 40 in Table 7. In some embodiments, the variable light chain has a LCDR1, LCDR2, and a LCDR3 as set forth for Clone 41 in Table 7. In some embodiments, the variable light chain has a LCDR1, LCDR2, and a LCDR3 as set forth for Clone 42 in Table 7. In some embodiments, the variable light chain has a LCDR1, LCDR2, and a LCDR3 as set forth for Clone 43 in Table 7. In some embodiments, the variable light chain has a LCDR1, LCDR2, and a LCDR3 as set forth for Clone 44 in Table 7. In some embodiments, the variable light chain has a LCDR1, LCDR2, and a LCDR3 as set forth for Clone 45 in Table 7. In some embodiments, the variable light chain has a LCDR1, LCDR2, and a LCDR3 as set forth for Clone 46 in Table 7. In some embodiments, the variable light chain has a LCDR1, LCDR2, and a LCDR3 as set forth for Clone 47 in Table 7. In some embodiments, the variable light chain has a LCDR1, LCDR2, and a LCDR3 as set forth for Clone 48 in Table 7. In some embodiments, the variable light chain has a LCDR1, LCDR2, and a LCDR3 as set forth for Clone 49 in Table 7. In some embodiments, the variable light chain has a LCDR1, LCDR2, and a LCDR3 as set forth for Clone 50 in Table 7. In some embodiments, the variable light chain has a LCDR1, LCDR2, and a LCDR3 as set forth for Clone 51 in Table 7. In some embodiments, the variable light chain has a LCDR1, LCDR2, and a LCDR3 as set forth for Clone 52 in Table 7. In some embodiments, the variable light chain has a LCDR1, LCDR2, and a LCDR3 as set forth for Clone 53 in Table 7. In some embodiments, the variable light chain has a LCDR1, LCDR2, and a LCDR3 as set forth for Clone 54 in Table 7. In some embodiments, the variable light chain has a LCDR1, LCDR2, and a LCDR3 as set forth for Clone 55 in Table 7. In some embodiments, the variable light chain has a LCDR1, LCDR2, and a LCDR3 as set forth for Clone 56 in Table 7. In some embodiments, the variable light chain has a LCDR1, LCDR2, and a LCDR3 as set forth for Clone 57 in Table 7. In some embodiments, the variable light chain has a LCDR1, LCDR2, and a LCDR3 as set forth for Clone 58 in Table 7. In some embodiments, the variable light chain has a LCDR1, LCDR2, and a LCDR3 as set forth for Clone 59 in Table 7. In some embodiments, the variable light chain has a LCDR1, LCDR2, and a LCDR3 as set forth for Clone 60 in Table 7. In some embodiments, the variable light chain has a LCDR1, LCDR2, and a LCDR3 as set forth for Clone 61 in Table 7. In some embodiments, the variable light chain has a LCDR1, LCDR2, and a LCDR3 as set forth for Clone 62 in Table 7. In some embodiments, the variable light chain has a LCDR1, LCDR2, and a LCDR3 as set forth for Clone 63 in Table 7. In some embodiments, the variable light chain has a LCDR1, LCDR2, and a LCDR3 as set forth for Clone 64 in Table 7. In some embodiments, the variable light chain has a LCDR1, LCDR2, and a LCDR3 as set forth for Clone 65 in Table 7. In some embodiments, the variable light chain has a LCDR1, LCDR2, and a LCDR3 as set forth for Clone 66 in Table 7. In some embodiments, the variable light chain has a LCDR1, LCDR2, and a LCDR3 as set forth for Clone 67 in Table 7. In some embodiments, the variable light chain has a LCDR1, LCDR2, and a LCDR3 as set forth for Clone 68 in Table 7. In some embodiments, the variable light chain has a LCDR1, LCDR2, and a LCDR3 as set forth for Clone 69 in Table 7. In some embodiments, the variable light chain has a LCDR1, LCDR2, and a LCDR3 as set forth for Clone 70 in Table 7. In some embodiments, the variable light chain has a LCDR1, LCDR2, and a LCDR3 as set forth for Clone 71 in Table 7. In some embodiments, the variable light chain has a LCDR1, LCDR2, and a LCDR3 as set forth for Clone 72 in Table 7. In some embodiments, the variable light chain has a LCDR1, LCDR2, and a LCDR3 as set forth for Clone 73 in Table 7. In some embodiments, the variable light chain has a LCDR1, LCDR2, and a LCDR3 as set forth for Clone 74 in Table 7. In some embodiments, the variable light chain has a LCDR1, LCDR2, and a LCDR3 as set forth for Clone 75 in Table 7. In some embodiments, the variable light chain has a LCDR1, LCDR2, and a LCDR3 as set forth for Clone 76 in Table 7. In some embodiments, the variable light chain has a LCDR1, LCDR2, and a LCDR3 as set forth for Clone 77 in Table 7. In some embodiments, the variable light chain has a LCDR1, LCDR2, and a LCDR3 as set forth for Clone 78 in Table 7. In some embodiments, the variable light chain has a LCDR1, LCDR2, and a LCDR3 as set forth for Clone 79 in Table 7. In some embodiments, the variable light chain has a LCDR1, LCDR2, and a LCDR3 as set forth for Clone 80 in Table 7. In some embodiments, the variable light chain has a LCDR1, LCDR2, and a LCDR3 as set forth for Clone 81 in Table 7. In some embodiments, the variable light chain has a LCDR1, LCDR2, and a LCDR3 as set forth for Clone 82 in Table 7. In some embodiments, the variable light chain has a LCDR1, LCDR2, and a LCDR3 as set forth for Clone 83 in Table 7. In some embodiments, the variable light chain has a LCDR1, LCDR2, and a LCDR3 as set forth for Clone 84 in Table 7.

[0396] In some embodiments, the variable light chain has a LCDR1, LCDR2, and a LCDR3 as set forth for MIAB128 in Table 9. In some embodiments, the variable light chain has a LCDR1, LCDR2, and a LCDR3 as set forth for MIAB128A in Table 9. In some embodiments, the variable light chain has a LCDR1, LCDR2, and a LCDR3 as set forth for MIAB129 in Table 9. In some embodiments, the variable light chain has a LCDR1, LCDR2, and a LCDR3 as set forth for MIAB130 in Table 9. In some embodiments, the variable light chain has a LCDR1, LCDR2, and a LCDR3 as set forth for MIAB131 in Table 9. In some embodiments, the variable light chain has a LCDR1, LCDR2, and a LCDR3 as set forth for MIAB132 in Table 9. In some embodiments, the variable light chain has a LCDR1, LCDR2, and a LCDR3 as set forth for MIAB133 in Table 9. In some embodiments, the variable light chain has a LCDR1, LCDR2, and a LCDR3 as set forth for MIAB134 in Table 9. In some embodiments, the variable light chain has a LCDR1, LCDR2, and a LCDR3 as set forth for MIAB135 in Table 9. In some embodiments, the variable light chain has a LCDR1, LCDR2, and a LCDR3 as set forth for MIAB136 in Table 9. In some embodiments, the variable light chain has a LCDR1, LCDR2, and a LCDR3 as set forth for MIAB137 in Table 9. In some embodiments, the variable light chain has a LCDR1, LCDR2, and a LCDR3 as set forth for MIAB138 in Table 9. In some embodiments, the variable light chain has a LCDR1, LCDR2, and a LCDR3 as set forth for MIAB139 in Table 9. In some embodiments, the variable light chain has a LCDR1, LCDR2, and a LCDR3 as set forth for MIAB140 in Table 9. In some embodiments, the variable light chain has a LCDR1, LCDR2, and a LCDR3 as set forth for MIAB141 in Table 9. In some embodiments, the variable light chain has a LCDR1, LCDR2, and a LCDR3 as set forth for MIAB142 in Table 9. In some embodiments, the variable light chain has a LCDR1, LCDR2, and a LCDR3 as set forth for MIAB143 in Table 9. In some embodiments, the variable light chain has a LCDR1, LCDR2, and a LCDR3 as set forth for MIAB144 in Table 9. In some embodiments, the variable light chain has a LCDR1, LCDR2, and a LCDR3 as set forth for MIAB145 in Table 9. In some embodiments, the variable light chain has a LCDR1, LCDR2, and a LCDR3 as set forth for MIAB146 in Table 9. In some embodiments, the variable light chain has a LCDR1, LCDR2, and a LCDR3 as set forth for MIAB147 in Table 9. In some embodiments, the variable light chain has a LCDR1, LCDR2, and a LCDR3 as set forth for MIAB148 in Table 9. In some embodiments, the variable light chain has a LCDR1, LCDR2, and a LCDR3 as set forth for MIAB149 in Table 9. In some embodiments, the variable light chain has a LCDR1, LCDR2, and a LCDR3 as set forth for MIAB150 in Table 9. In some embodiments, the variable light chain has a LCDR1, LCDR2, and a LCDR3 as set forth for MIAB151 in Table 9. In some embodiments, the variable light chain has a LCDR1, LCDR2, and a LCDR3 as set forth for MIAB152 in Table 9. In some embodiments, the variable light chain has a LCDR1, LCDR2, and a LCDR3 as set forth for MIAB153 in Table 9. In some embodiments, the variable light chain has a LCDR1, LCDR2, and a LCDR3 as set forth for MIAB154 in Table 9. In some embodiments, the variable light chain has a LCDR1, LCDR2, and a LCDR3 as set forth for MIAB155 in Table 9. In some embodiments, the variable light chain has a LCDR1, LCDR2, and a LCDR3 as set forth for MIAB156 in Table 9. In some embodiments, the variable light chain has a LCDR1, LCDR2, and a LCDR3 as set forth for MIAB157 in Table 9. In some embodiments, the variable light chain has a LCDR1, LCDR2, and a LCDR3 as set forth for MIAB158 in Table 9. In some embodiments, the variable light chain has a LCDR1, LCDR2, and a LCDR3 as set forth for MIAB159 in Table 9. In some embodiments, the variable light chain has a LCDR1, LCDR2, and a LCDR3 as set forth for MIAB160 in Table 9. In some embodiments, the variable light chain has a LCDR1, LCDR2, and a LCDR3 as set forth for MIAB161 in Table 9. In some embodiments, the variable light chain has a LCDR1, LCDR2, and a LCDR3 as set forth for MIAB162 in Table 9. In some embodiments, the variable light chain has a LCDR1, LCDR2, and a LCDR3 as set forth for MIAB163 in Table 9. In some embodiments, the variable light chain has a LCDR1, LCDR2, and a LCDR3 as set forth for MIAB164 in Table 9. In some embodiments, the variable light chain has a LCDR1, LCDR2, and a LCDR3 as set forth for MIAB165 in Table 9. In some embodiments, the variable light chain has a LCDR1, LCDR2, and a LCDR3 as set forth for MIAB166 in Table 9. In some embodiments, the variable light chain has a LCDR1, LCDR2, and a LCDR3 as set forth for MIAB167 in Table 9. In some embodiments, the variable light chain has a LCDR1, LCDR2, and a LCDR3 as set forth for MIAB168 in Table 9. In some embodiments, the variable light chain has a LCDR1, LCDR2, and a LCDR3 as set forth for MIAB169 in Table 9. In some embodiments, the variable light chain has a LCDR1, LCDR2, and a LCDR3 as set forth for MIAB170 in Table 9. In some embodiments, the variable light chain has a LCDR1, LCDR2, and a LCDR3 as set forth for MIAB171 in Table 9. In some embodiments, the variable light chain has a LCDR1, LCDR2, and a LCDR3 as set forth for MIAB172 in Table 9. In some embodiments, the variable light chain has a LCDR1, LCDR2, and a LCDR3 as set forth for MIAB173 in Table 9. In some embodiments, the variable light chain has a LCDR1, LCDR2, and a LCDR3 as set forth for MIAB174 in Table 9. In some embodiments, the variable light chain has a LCDR1, LCDR2, and a LCDR3 as set forth for MIAB175 in Table 9. In some embodiments, the variable light chain has a LCDR1, LCDR2, and a LCDR3 as set forth for MIAB176 in Table 9. In some embodiments, the variable light chain has a LCDR1, LCDR2, and a LCDR3 as set forth for MIAB177 in Table 9. In some embodiments, the variable light chain has a LCDR1, LCDR2, and a LCDR3 as set forth for MIAB178 in Table 9. In some embodiments, the variable light chain has a LCDR1, LCDR2, and a LCDR3 as set forth for MIAB179 in Table 9. In some embodiments, the variable light chain has a LCDR1, LCDR2, and a LCDR3 as set forth for MIAB180 in Table 9. In some embodiments, the variable light chain has a LCDR1, LCDR2, and a LCDR3 as set forth for MIAB181 in Table 9. In some embodiments, the variable light chain has a LCDR1, LCDR2, and a LCDR3 as set forth for MIAB182 in Table 9. In some embodiments, the variable light chain has a LCDR1, LCDR2, and a LCDR3 as set forth for MIAB183 in Table 9. In some embodiments, the variable light chain has a LCDR1, LCDR2, and a LCDR3 as set forth for MIAB184 in Table 9. In some embodiments, the variable light chain has a LCDR1, LCDR2, and a LCDR3 as set forth for MIAB185 in Table 9. In some embodiments, the variable light chain has a LCDR1, LCDR2, and a LCDR3 as set forth for MIAB186 in Table 9. In some embodiments, the variable light chain has a LCDR1, LCDR2, and a LCDR3 as set forth for MIAB187 in Table 9. In some embodiments, the variable light chain has a LCDR1, LCDR2, and a LCDR3 as set forth for MIAB188 in Table 9. In some embodiments, the variable light chain has a LCDR1, LCDR2, and a LCDR3 as set forth for MIAB189 in Table 9. In some embodiments, the variable light chain has a LCDR1, LCDR2, and a LCDR3 as set forth for MIAB190 in Table 9. In some embodiments, the variable light chain has a LCDR1, LCDR2, and a LCDR3 as set forth for MIAB191 in Table 9. In some embodiments, the variable light chain has a LCDR1, LCDR2, and a LCDR3 as set forth for MIAB192 in Table 9. In some embodiments, the variable light chain has a LCDR1, LCDR2, and a LCDR3 as set forth for MIAB193 in Table 9. In some embodiments, the variable light chain has a LCDR1, LCDR2, and a LCDR3 as set forth for MIAB194 in Table 9. In some embodiments, the variable light chain has a LCDR1, LCDR2, and a LCDR3 as set forth for MIAB195 in Table 9. In some embodiments, the variable light chain has a LCDR1, LCDR2, and a LCDR3 as set forth for MIAB196 in Table 9. In some embodiments, the variable light chain has a LCDR1, LCDR2, and a LCDR3 as set forth for MIAB197 in Table 9. In some embodiments, the variable light chain has a LCDR1, LCDR2, and a LCDR3 as set forth for MIAB198 in Table 9.

[0397] In some embodiments, the variable light chain has a LCDR1, LCDR2, and a LCDR3 as set forth for PMAB61 in Table 14. In some embodiments, the variable light chain has a LCDR1, LCDR2, and a LCDR3 as set forth for PMAB62 in Table 14. In some embodiments, the variable light chain has a LCDR1, LCDR2, and a LCDR3 as set forth for PMAB63 in Table 14. In some embodiments, the variable light chain has a LCDR1, LCDR2, and a LCDR3 as set forth for PMA64 in Table 14. In some embodiments, the variable light chain has a LCDR1, LCDR2, and a LCDR3 as set forth for PMAB65 in Table 14. In some embodiments, the variable light chain has a LCDR1, LCDR2, and a LCDR3 as set forth for PMAB66 in Table 14. In some embodiments, the variable light chain has a LCDR1, LCDR2, and a LCDR3 as set forth for PMAB67 in Table 14. In some embodiments, the variable light chain has a LCDR1, LCDR2, and a LCDR3 as set forth for PMAB68 in Table 14.

[0398] In some embodiments, the variable light chain has a LCDR1, LCDR2, and a LCDR3 as set forth for MIAB212 in Table 15. In some embodiments, the variable light chain has a LCDR1, LCDR2, and a LCDR3 as set forth for MIAB213 in Table 15. In some embodiments, the variable light chain has a LCDR1, LCDR2, and a LCDR3 as set forth for MIAB214 in Table 15.

[0399] In some embodiments, the CDRS are swapped for one another. For example, the HCDR1 of clone 1 can be substituted for the HCDR1 of clone 10, or vice versa. This CDR swapping can be done for any of the HCDRs of the clones provided herein (e.g., HCDR1 for HCDR1; HCDR2 for HCDR2; or HCDR3 for HCDR3) or the LCDRs (e.g., LCDR1 for LCDR1; LCDR2 for LCDR2; or LCDR3 for LCDR3). Therefore, in some embodiments, the antibody comprises a HCDR1 as set forth in any of Clones 1-66 of Table 6, Clones 1-84 of Table 7, MIAB128-198 of Table 9, or PMAB61-68 of Table 13 or Table 14; a HCDR2 as set forth in any of Clones 1-66 of Table 6, Clones 1-84 of Table 7, MIAB128-198 of Table 9, or PMAB61-68 of Table 13 or Table 14; a HCDR3 as set forth in any of Clones 1-66 of Table 6, Clones 1-84 of Table 7, MIAB128-198 of Table 9, or PMAB61-68 of Table 13 or Table 14; a LCDR1 as set forth in any of Clones 1-66 of Table 6, Clones 1-84 of Table 7, MIAB128-198 of Table 9, or PMAB61-68 of Table 13 or Table 14; a LCDR2 as set forth in any of Clones 1-66 of Table 6, Clones 1-84 of Table 7, MIAB128-198 of Table 9, or PMAB61-68 of Table 13 or Table 14; a LCDR3 as set forth in any of Clones 1-66 of Table 6, Clones 1-84 of Table 7, MIAB128-198 of Table 9, or PMAB61-68 of Table 13 or Table 14, or a variant of any of the foregoing.

[0400] In some embodiments, the MAdCAM Antibody is a scFV format as shown in clones 6, 59, 63, MIAB199, MIAB200, MIAB201, MIAB202, MIAB203, MIAB204, or PMAB61-231. The linker as shown in those sequences is 20 amino acid residues in length, but could also be 5, 10, or 15 amino acid residues in length. In some embodiments, the linker the links the VH and VL(or VK) sequences of the antibody is a glycine/serine linker, which can be a sequence of GGGGSGGGGSGGGGSGGGGS (SEQ ID NO: 22) or GGGGSGGGGSGGGGS (SEQ ID NO: 30). This is simply a non-limiting example and the linker can have varying number of GGGGS (SEQ ID NO: 23) or GGGGA repeats (SEQ ID NO: 29). In some embodiments, the linker comprises 1, 2, 3, 4, 5, 6, 7, 8, 9, or 10 of the GGGGS (SEQ ID NO: 23) or GGGGA (SEQ ID NO: 29) repeats (repeats disclosed as SEQ ID NOs: 1750 and 1748, respectively, in order of appearance). Thus, the linkers shown in Table 6 are non-limiting examples and can be substituted with any other linkers, such as those provided for herein.

[0401] In some embodiments, the polypeptide comprises the formula of:

APTSSSTKKTQLQLEHLLLDLQMILNGINNYKNPKLTRMLTFKFYMPKKA
TELKHLQCLEEELKPLEEALNLAPSKNFHLRPRDLISDINVIVLELKGSE
TTFMCEYADETATIVEFINRWITFSQSIISTLT-Linker1-
DKTHTCPPCPAPEAAGAPSVFLFPPKPKDTLMISRTPEVTCVVVDVSHED
PEVKFNWYVDGVEVHNAKTKPREEQYNSTYRVVSVLTVLHQDWLNGKEYK
CKVSNKALPAPIEKTISKAKGQPREPQVYTLPPSREEMTKNQVSLTCLVK
GFYPSDIAVEWESNGQPENNYKTTPPVLDSDGSFFLYSKLTVDKSRWQQG
NVESCSVMHEALHNHYTQKSLSLSPG-Linker2-Ab (SEQ ID NOs:
1745 and 1746, respectively, in order of
appearance),

wherein Linker 1, Linker2, and Ab are as provided herein. In some embodiments, Linker 1 is GGGGSGGGGSGGGGS (SEQ ID NO: 30) or GGGGSGGGGSGGGGSGGGGS (SEQ ID NO: 22). In some embodiments, Linker 2 is GGGGS (SEQ ID NO: 23). In some embodiments, Linker 2 is GGGGSGGGGS (SEQ ID NO: 619). In some embodiments, Linker 2 is GGGGSGGGGSGGGGS (SEQ ID NO: 30). In some embodiments, Ab is the scFV as set forth in Table 6, Table 12, or Table 14. In some embodiments, the Ab comprises a sequence of SEQ ID NO: 95. In some embodiments, the Ab comprises a sequence of SEQ ID NO: 364. In some embodiments, the Ab comprises a sequence of SEQ ID NO: 386. In some embodiments, the Ab comprises a sequences of SEQ ID NOs: 1478, 44, 30, 1445, 22, 1367, 1479, 45. In some embodiments, the Ab comprises a sequences of SEQ ID NOs: 1476, 44, 30, 1445, 22, 1367, 1359, 45. In some embodiments, the Ab comprises a VH and a VK or VL segment. In some embodiments, the VH comprises a sequence as set forth in Table 7, Table 9, Table 10, or Table 12. In some embodiments, the VK comprises a sequence as set forth in Table 7, Table 9, Table 10, or Table 12. In some embodiments, the Ab comprises a VH and a VK as set forth for the clones in Table 7, Table 9, Table 10, or Table 12. In some embodiments, the VH and VK are linked by a linker. In some embodiments, the VH and VK are linked by a peptide linker comprising a peptide of GGGGSGGGGSGGGGSGGGGS (SEQ ID NO: 22). In some embodiments, the VH and VK are linked by a peptide linker comprising a peptide of GGGGS (SEQ ID NO: 23). In some embodiments, the VH and VK are linked by a peptide linker comprising a peptide of GGGGSGGGGS (SEQ ID NO: 619). In some embodiments, the VH and VK are linked by a peptide linker comprising a peptide of GGGGSGGGGSGGGGS (SEQ ID NO: 30).

[0402] In some embodiments, the Ab comprises a VH of SEQ ID NO: 414 and a VK of SEQ ID NO: 415. In some embodiments, the Ab comprises a VH of SEQ ID NO: 591 and a VK of SEQ ID NO: 592. In some embodiments, the Ab comprises a VH of SEQ ID NO: 599 and a VK of SEQ ID NO: 600. In some embodiments, the Ab comprises a VH of SEQ ID NO: 1478 and a VK of SEQ ID NO: 1479. In some embodiments, the Ab comprises a VH of SEQ ID NO: 1445 and a VK of SEQ ID NO: 1367. In some embodiments, the Ab comprises a VH of SEQ ID NO: 1476 and a VK of SEQ ID NO: 1359.

[0403] In some embodiments, the peptide comprises:

(SEQ ID NO: 1747)
APTSSSTKKTQLQLEHLLLDLQMILNGINNYKNPKLTRMLTFKFYMPKKA
TELKHLQCLEEELKPLEEALNLAPSKNFHLRPRDLISDINVIVLELKGSE
TTFMCEYADETATIVEFINRWITFSQSIISTLT- (GGGGSGGGGSGGGG
S or GGGGSGGGGSGGGGSGGGGS) -DKTHTCPPCPAPEAAGAPSVFL
FPPKPKDTLMISRTPEVTCVVVDVSHEDPEVKFNWYVDGVEVHNAKTKPR
EEQYNSTYRVVSVLTVLHQDWLNGKEYKCKVSNKALPAPIEKTISKAKGQ
PREPQVYTLPPSREEMTKNQVSLTCLVKGFYPSDIAVEWESNGQPENNYK
TTPPVLDSDGSFFLYSKLTVDKSRWQQGNVFSCSVMHEALHNHYTQKSLS
LSPG- (GGGGS or GGGGSGGGGS or GGGGSGGGGSGGGGS)-Ab,

wherein Ab is set forth as herein. In some embodiments, the Ab comprises a sequence of SEQ ID NO: 95. In some embodiments, the Ab comprises a sequence of SEQ ID NO: 364. In some embodiments, the Ab comprises a sequence of SEQ ID NO: 386. In some embodiments, the Ab comprises a VH and a VK or VL segment. In some embodiments, the VH comprises a sequence as set forth in Table 7, Table 9, Table 10, Table 12, or Table 14. In some embodiments, the VK comprises a sequence as set forth in Table 7, Table 9, Table 10, Table 12, or Table 14. In some embodiments, the Ab comprises a VH and a VK as set forth for the clones in Table 7, Table 9, Table 10, Table 12, or Table 14. In some embodiments, the VH and VK are linked by a linker. In some embodiments, the VH and VK are linked by a peptide linker comprising a peptide of GGGGSGGGGSGGGGSGGGGS (SEQ ID NO: 22). In some embodiments, the VH and VK are linked by a peptide linker comprising a peptide of GGGGS (SEQ ID NO: 23). In some embodiments, the VH and VK are linked by a peptide linker comprising a peptide of GGGGSGGGGS (SEQ ID NO: 619).

[0404] In some embodiments, the Ab comprises a VH of SEQ ID NO: 414 and a VK of SEQ ID NO: 415. In some embodiments, the Ab comprises a VH of SEQ ID NO: 591 and a VK of SEQ ID NO: 592. In some embodiments, the Ab comprises a VH of SEQ ID NO: 599 and a VK of SEQ ID NO: 600. In some embodiments, the Ab comprises a VH of SEQ ID NO: 1478 and a VK of SEQ ID NO: 1479. In some embodiments, the Ab comprises a VH of SEQ ID NO: 1445 and a VK of SEQ ID NO: 1367. In some embodiments, the Ab comprises a VH of SEQ ID NO: 1476 and a VK of SEQ ID NO: 1359. These examples are non-limiting the combinations of VH and VK as shown in Table 7, Table 9, Table 10, or Table 12 are also provided.

[0405] In some embodiments, the therapeutic compound or polypeptide comprises a formula of an anti-PD-1 heavy and light chain, wherein the PD-1 heavy chain is linked to a MAdCAM antibody (scFV), such as those provided herein at the C-terminus of the PD-1 IgG heavy chain. The polypeptide can have the formula of A1-A2-Linker1-A4-Linker2-A5 and A6, wherein A1 is a PD-1 heavy chain, A6 is a PD-1 light chain; A2 is a IgG constant domain (e.g. IgG1 Constant domain), Linker 1 is as provided herein, such as, but not limited to, a glycine/serine linker, which can be a sequence of GGGGSGGGGSGGGGSGGGGS (SEQ ID NO: 22) or GGGGSGGGGSGGGGS (SEQ ID NO: 30), or GGGSEGGGSEGGGSE (SEQ ID NO: 1546) which are simply a non-limiting example and the linker can have varying number of GGGGS (SEQ ID NO: 23) or GGGGA (SEQ ID NO: 29) repeats and in some embodiments, the linker comprises 1, 2, 3, 4, 5, 6, 7, 8, 9, or 10 of the GGGGS (SEQ ID NO: 23) or GGGGA (SEQ ID NO: 29) repeats (repeats disclosed as SEQ ID NOs: 1750 and 1748, respectively, in order of appearance); A4 is VH domain, such as those set forth in Table 7 or Table 12; Linker 2 is as provided herein, such as, but not limited to, a glycine/serine linker, which can be a sequence of GGGGSGGGGSGGGGSGGGGS (SEQ ID NO: 22) or GGGGSGGGGSGGGGS (SEQ ID NO: 30), which are simply a non-limiting example and the linker can have varying number of GGGGS (SEQ ID NO: 23) or GGGGA (SEQ ID NO: 29) repeats, and in some embodiments, the linker comprises 1, 2, 3, 4, 5, 6, 7, 8, 9, or 10 of the GGGGS (SEQ ID NO: 23) or GGGGA (SEQ ID NO: 29) repeats (repeats disclosed as SEQ ID NOs: 1750 and 1748, respectively, in order of appearance); and A5 is VK/VL domain, such as those set forth in Table 7 or Table 12. In some embodiments, Linker 2 is GGGGSGGGGSGGGGS (SEQ ID NO: 30). In some embodiments, the A4-Linker2-A5 is a scFV antibody, such as those set forth in Table 6. The linkers shown in Table 6 can be substituted with the linker of GGGGSGGGGSGGGGS (SEQ ID NO: 30). In some embodiments, the A4-Linker2-A5 comprises the HCDR sets (e.g., HCDR1, HCDR2, HCDR3, LCDR1, LCDR2, and LCDR3) sets as set forth in Table 6, Table 7 or Table 12. For the avoidance of doubt, a CDR set refers to the CDRs illustrated for each of the different antibody clones provided for in the tables. In some embodiments, A4 comprises a peptide of SEQ ID NO: 414 and A5 comprises a peptide of SEQ ID NO: 415. In some embodiments, A4 comprises a peptide of SEQ ID NO: 591 and A5 comprises a peptide of SEQ ID NO: 592. In some embodiments, A4 comprises a peptide of SEQ ID NO: 599 and A5 comprises a peptide of SEQ ID NO: 600. In some embodiments, A4 comprises a peptide of SEQ ID NO: 1445 and A5 comprises a peptide of SEQ ID NO: 1367. These examples are non-limiting the combinations of VH and VK as shown in Table 7, or Table 12 are also provided.

[0406] In some embodiments, A2 comprises a sequence of

(SEQ ID NO: 44)
ASTKGPSVFPLAPSSKSTSGGTAALGCLVKDYFPEPVTVSWNSGALTSGV
HTFPAVLQSSGLYSLSSVVTVPSSSLGTQTYICNVNHKPSNTKVDKKVEP
KSCDKTHTCPPCPAPEAAGAPSVFLFPPKPKDTLMISRTPEVTCVVVDVS
HEDPEVKFNWYVDGVEVHNAKTKPREEQYNSTYRVVSVLTVLHQDWLNGK
EYKCKVSNKALPAPIEKTISKAKGQPREPQVYTLPPSREEMTKNQVSLTC
LVKGFYPSDIAVEWESNGQPENNYKTTPPVLDSDGSFFLYSKLTVDKSRW
QQGNVFSCSVMHEALHNHYTQKSLSLSPG.

[0407] In some embodiments, once expressed the heavy and light chains of the PD-1 antibody bind to one another to form the compound comprising the anti-PD-1 antibody linked to the anti-MAdCAM antibody. The anti-MAdCAM antibody can be any antibody that binds to MAdCAM, such as those provided for herein.

[0408] In some embodiments, the therapeutic compound comprises one or more sequences selected from the sequence in the following table:

TABLE 12

| | Chain 1 | | | | | | Chain 2 | |
|---|---|---|---|---|---|---|---|---|
| | Fab VH | | Linker | scFv VH | Linker | scFv VK | Fab VK | CK |
| Clone | Seq | CH1-CH3 Seq | Seq | Seq | Seq | Seq | Seq | Seq |
| PMAB61 | EVQLVQ | ASTKGPSVFPLAPS | GGGGSG | EVQLLESG | GGGGSG | DIQMTQS | DIQMTQS | RTVAA |
| | SGAEVK | SKSTSGGTAALGCL | GGGSGG | GGLVQPGG | GGGSGG | PSSLSAS | PSSLSAS | PSVFI |
| | KPGASV | VKDYFPEPVTVSWN | GGS | SLRLSCAA | GGSGGG | VGDRVTI | VGDRVTI | FPPSD |
| | KVSCKA | SGALTSGVHTFPAV | (SEQ | SGFTFSSY | GS | TCRASQS | TCRASQS | EQLKS |
| | SGYSFT | LQSSGLYSLSSVVT | ID NO: | WMHWVRQA | (SEQ | ISSSLAW | ISSYLAW | GTASV |
| | SYYMHW | VPSSSLGTQTYICN | 30) | PGKGLEWV | ID NO: | YQQKPGK | YQQKPGK | VCLLN |
| | VRQAPG | VNHKPSNTKVDKKV | | SYISGSGG | 22) | APKLLIY | APKLLIY | NFYPR |
| | QGLEWM | EPKSCDKTHTCPPC | | YTNYADSV | | AASSLQS | AASSLQS | EAKVQ |
| | GIINPS | PAPEAAGAPSVELE | | KGRFTISR | | GVPSRFS | GVPSRFS | WKVDN |
| | GGSTSY | PPKPKDTLMISRTP | | DNSKNTLY | | GSGSGTD | GSGSGTD | ALQSG |
| | AQKFQG | EVTCVVVDVSHEDP | | LQMNSLRA | | FTLTISS | FTLTISS | NSQES |
| | RVTMTR | EVKFNWYVDGVEVH | | EDTAVYYC | | LQPEDFA | LQPEDFA | VTEQD |
| | DTSTST | NAKTKPREEQYNST | | ARDRPYYY | | TYYCQQY | TYYCQQS | SKDST |
| | VYMELS | YRVVSVLTVLHQDW | | DMDVWGKG | | KSYPVTF | YSTPPTF | YSLSS |
| | SLRSED | LNGKEYKCKVSNKA | | TTVTVSS | | GQGTKVE | GPGTKVD | TLTLS |
| | TAVYYC | LPAPIEKTISKAKG | | (SEQ ID | | IK (SEQ | IK (SEQ | KADYE |
| | ASGWVY | QPREPQVYTLPPSR | | NO: | | ID NO: | ID NO: | KHKVY |
| | WGQGTL | EEMTKNQVSLTCLV | | 1445) | | 1367) | 1479) | ACEVT |
| | VTVSS | KGFYPSDIAVEWES | | | | | | HQGLS |
| | (SEQ | NGQPENNYKTTPPV | | | | | | SPVTK |
| | ID NO: | LDSDGSFFLYSKLT | | | | | | SFNRG |
| | 1478) | VDKSRWQQGNVFSC | | | | | | EC |
| | | SVMHEALHNHYTQK | | | | | | (SEQ |
| | | SLSLSPG (SEQ | | | | | | ID |
| | | ID NO: 44) | | | | | | NO: |
| | | | | | | | | 45) |
| PMAB62 | EVQLVQ | ASTKGPSVFPLAPS | GGGGSG | EVQLLESG | GGGGSG | DIQMTQS | DIQMTQS | RTVAA |
| | SGAEVK | SKSTSGGTAALGCL | GGGSGG | GGLVQPGG | GGGSGG | PSSLSAS | PSSLSAS | PSVFI |
| | KPGASV | VKDYFPEPVTVSWN | GGS | SLRLSCAA | GGSGGG | VGDRVTI | VGDRVTI | FPPSD |
| | KVSCKA | SGALTSGVHTFPAV | (SEQ | SGFTFSSY | GS | TCRASQS | TCRASQS | EQLKS |
| | SGYSFT | LQSSGLYSLSSVVT | ID NO: | WMHWVRQA | (SEQ | ISSSLAW | ISSYLAW | GTASV |
| | SYYMHW | VPSSSLGTQTYICN | 30) | PGKGLEWV | ID NO: | YQQKPGK | YQQKPGK | VCLLN |
| | VRQAPG | VNHKPSNTKVDKKV | | SYISGSGG | 22) | APKLLIY | APKLLIY | NFYPR |
| | QGLEWM | EPKSCDKTHTCPPC | | YTNYADSV | | AASSLQS | AASSLQS | EAKVQ |
| | GIINPS | PAPEAAGAPSVELE | | KGRFTISR | | GVPSRFS | GVPSRFS | WKVDN |
| | GGSTSY | PPKPKDTLMISRTP | | DNSKNTLY | | GSGSGTD | GSGSGTD | ALQSG |
| | AQKFQG | EVTCVVVDVSHEDP | | LQMNSLRA | | FTLTISS | FTLTISS | NSQES |
| | RVTMTR | EVKFNWYVDGVEVH | | EDTAVYYC | | LQPEDFA | LQPEDFA | VTEQD |
| | DTSTST | NAKTKPREEQYNST | | ARDRPYYY | | TYYCQQY | TYYCQQS | SKDST |
| | VYMELS | YRVVSVLTVLHQDW | | DLDVWGKG | | KSYPVTF | YSTPPTF | YSLSS |
| | SLRSED | LNGKEYKCKVSNKA | | TTVTVSS | | GQGTKVE | GPGTKVD | TLTLS |
| | TAVYYC | LPAPIEKTISKAKG | | (SEQ ID | | IK (SEQ | IK (SEQ | KADYE |
| | ASGWVY | QPREPQVYTLPPSR | | NO: | | ID NO: | ID NO: | KHKVY |
| | WGQGTL | EEMTKNQVSLTCLV | | 1480) | | 1367) | 1479) | ACEVT |
| | VTVSS | KGFYPSDIAVEWES | | | | | | HQGLS |
| | (SEQ | NGQPENNYKTTPPV | | | | | | SPVTK |
| | ID NO: | LDSDGSFFLYSKLT | | | | | | SFNRG |
| | 1478) | VDKSRWQQGNVFSC | | | | | | EC |
| | | SVMHEALHNHYTQK | | | | | | (SEQ |
| | | SLSLSPG (SEQ | | | | | | ID |
| | | ID NO: 44) | | | | | | NO: |
| | | | | | | | | 45) |
| PMAB63 | EVQLVQ | ASTKGPSVFPLAPS | GGGGSG | EVQLLESG | GGGGSG | DIQMTQS | DIQMTQS | RTVAA |
| | SGAEVK | SKSTSGGTAALGCL | GGGSGG | GGLVQPGG | GGGSGG | PSSLSAS | PSSLSAS | PSVFI |
| | KPGASV | VKDYFPEPVTVSWN | GGS | SLRLSCAA | GGSGGG | VGDRVTI | VGDRVTI | FPPSD |
| | KVSCKA | SGALTSGVHTFPAV | (SEQ | SGFTFSSY | GS | TCRASQS | TCRASQS | EQLKS |
| | SGYSFT | LQSSGLYSLSSVVT | ID NO: | WMHWVRQA | (SEQ | ISSSLAW | ISSYLAW | GTASV |
| | SYYMHW | VPSSSLGTQTYICN | 30) | PGKCLEWV | ID NO: | YQQKPGK | YQQKPGK | VCLLN |
| | VRQAPG | VNHKPSNTKVDKKV | | SYISGSGG | 22) | APKLLIY | APKLLIY | NFYPR |
| | QGLEWM | EPKSCDKTHTCPPC | | YTNYADSV | | AASSLQS | AASSLQS | EAKVQ |
| | GIINPS | PAPEAAGAPSVELE | | KGRFTISR | | GVPSRFS | GVPSRFS | WKVDN |
| | GGSTSY | PPKPKDTLMISRTP | | DNSKNTLY | | GSGSGTD | GSGSGTD | ALQSG |
| | AQKFQG | EVTCVVVDVSHEDP | | LQMNSLRA | | FTLTISS | FTLTISS | NSQES |
| | RVTMTR | EVKFNWYVDGVEVH | | EDTAVYYC | | LQPEDFA | LQPEDFA | VTEQD |
| | DTSTST | NAKTKPREEQYNST | | ARDRPYYY | | TYYCQQY | TYYCQQS | SKDST |
| | VYMELS | YRVVSVLTVLHQDW | | DLDVWGKG | | KSYPVTE | YSTPPTF | YSLSS |
| | SLRSED | LNGKEYKCKVSNKA | | TTVTVSS | | GCGTKVE | GPGTKVD | TLTLS |
| | TAVYYC | LPAPIEKTISKAKG | | (SEQ ID | | IK (SEQ | IK (SEQ | KADYE |
| | ASGWVY | QPREPQVYTLPPSR | | NO: | | ID NO: | ID NO: | KHKVY |
| | WGQGTL | EEMTKNQVSLTCLV | | 1545) | | 1543) | 1479) | ACEVT |
| | VTVSS | KGFYPSDIAVEWES | | | | | | HQGLS |
| | (SEQ | NGQPENNYKTTPPV | | | | | | SPVTK |
| | ID NO: | LDSDGSFFLYSKLT | | | | | | SFNRG |
| | 1478) | VDKSRWQQGNVFSC | | | | | | EC |
| | | SVMHEALHNHYTQK | | | | | | (SEQ |
| | | SLSLSPG (SEQ | | | | | | ID |
| | | ID NO: 44) | | | | | | NO: |
| | | | | | | | | 45) |
| PMAB64 | EVQLVQ | ASTKGPSVFPLAPS | GGGGSG | EVQLLESG | GGGGSG | DIQMTQS | DIQMTQS | RTVAA |
| | SGAEVK | SKSTSGGTAALGCL | GGGSGG | GGLVQPGG | GGGSGG | PSSLSAS | PSSLSAS | PSVFI |
| | KPGASV | VKDYFPEPVTVSWN | GGS | SLRLSCAA | GGSGGG | VGDRVTI | VGDRVTI | FPPSD |
| | KVSCKA | SGALTSGVHTFPAV | (SEQ | SGFTFSSY | GS | TCRASQS | TCRASQS | EQLKS |
| | SGYSFT | LQSSGLYSLSSVVT | ID NO: | WMHWVRQA | (SEQ | ISSSLAW | ISSYLAW | GTASV |
| | SYYMHW | VPSSSLGTQTYICN | 30) | PGKCLEWV | ID NO: | YQQKPGK | YQQKPGK | VCLLN |
| | VRQAPG | VNHKPSNTKVDKKV | | SYISGSGG | 22) | APKLLIY | APKLLIY | NFYPR |
| | QGLEWM | EPKSCDKTHTCPPC | | YTNYADSV | | AASSLQS | AASSLQS | EAKVQ |
| | GIINPS | PAPEAAGAPSVELE | | KGRFTISR | | GVPSRFS | GVPSRFS | WKVDN |
| | GGSTSY | PPKPKDTLMISRTP | | DNSKNTLY | | GSGSGTD | GSGSGTD | ALQSG |
| | AQKFQG | EVTCVVVDVSHEDP | | LQMNSLRA | | FTLTISS | FTLTISS | NSQES |
| | RVTMTR | EVKFNWYVDGVEVH | | EDTAVYYC | | LQPEDFA | LQPEDFA | VTEQD |
| | DTSTST | NAKTKPREEQYNST | | ARDRPYYY | | TYYCQQY | TYYCQQS | SKDST |
| | VYMELS | YRVVSVLTVLHQDW | | DMDVWGKG | | KSYPVTE | YSTPPTF | YSLSS |
| | SLRSED | LNGKEYKCKVSNKA | | TTVTVSS | | GCGTKVE | GPGTKVD | TLTLS |
| | TAVYYC | LPAPIEKTISKAKG | | (SEQ ID | | IK (SEQ | IK (SEQ | KADYE |
| | ASGWVY | QPREPQVYTLPPSR | | NO: | | ID NO: | ID NO: | KHKVY |
| | WGQGTL | EEMTKNQVSLTCLV | | 1542) | | 1543) | 1479) | ACEVT |
| | VTVSS | KGFYPSDIAVEWES | | | | | | HQGLS |
| | (SEQ | NGQPENNYKTTPPV | | | | | | SPVTK |
| | ID NO: | LDSDGSFFLYSKLT | | | | | | SFNRG |
| | 1478) | VDKSRWQQGNVFSC | | | | | | EC |
| | | SVMHEALHNHYTQK | | | | | | (SEQ |
| | | SLSLSPG (SEQ | | | | | | ID |
| | | ID NO: 44) | | | | | | NO: |
| | | | | | | | | 45) |
| PMAB65 | EVQLLE | ASTKGPSVFPLAPS | GGGGSG | EVQLLESG | GGGGSG | DIQMTQS | DIVMTQS | RTVAA |
| | SGGGLV | SKSTSGGTAALGCL | GGGSGG | GGLVQPGG | GGGSGG | PSSLSAS | PDSLAVS | PSVFI |
| | QPGGSL | VKDYFPEPVTVSWN | GGS | SLRLSCAA | GGSGGG | VGDRVTI | LGERATI | FPPSD |
| | RLSCAA | SGALTSGVHTFPAV | (SEQ | SGFTFSSY | GS | TCRASQS | NCKSSQS | EQLKS |
| | SGFTFS | LQSSGLYSLSSVVT | ID NO: | WMHWVRQA | (SEQ | ISSSLAW | VLYSPNN | GTASV |
| | SYDMSW | VPSSSLGTQTYICN | 30) | PGKGLEWV | ID NO: | YQQKPGK | KNYLAWY | VCLLN |
| | VRQAPG | VNHKPSNTKVDKKV | | SYISGSGG | 22) | APKLLIY | QQKPGQP | NFYPR |
| | KGLEWV | EPKSCDKTHTCPPC | | YTNYADSV | | AASSLQS | PKLLIYW | EAKVQ |
| | SGITIS | PAPEAAGAPSVELE | | KGRFTISR | | GVPSRFS | ASTRESG | WKVDN |
| | GGSTYY | PPKPKDTLMISRTP | | DNSKNTLY | | GSGSGTD | VPDRFSG | ALQSG |
| | ADSVKG | EVTCVVVDVSHEDP | | LQMNSLRA | | FTLTISS | SGSGTDF | NSQES |
| | RFTISR | EVKFNWYVDGVEVH | | EDTAVYYC | | LQPEDFA | TLTISSL | VTEQD |
| | DNSKNT | NAKTKPREEQYNST | | ARDRPYYY | | TYYCQQY | QAEDVAV | SKDST |
| | LYLQMN | YRVVSVLTVLHQDW | | DMDVWGKG | | KSYPVTF | YYCQQYY | YSLSS |
| | SLRAED | LNGKEYKCKVSNKA | | TTVTVSS | | GQGTKVE | TTPPTFG | TLTLS |
| | TAVYYC | LPAPIEKTISKAKG | | (SEQ ID | | IK (SEQ | QGTRLEI | KADYE |
| | ARGRGG | QPREPQVYTLPPSR | | NO: | | ID NO: | K (SEQ | KHKVY |
| | SGWLDY | EEMTKNQVSLTCLV | | 1445) | | 1367) | ID NO: | ACEVT |
| | WGQGTT | KGFYPSDIAVEWES | | | | | 1359) | HQGLS |
| | VTVSS | NGQPENNYKTTPPV | | | | | | SPVTK |
| | (SEQ | LDSDGSFFLYSKLT | | | | | | SFNRG |
| | ID NO: | VDKSRWQQGNVFSC | | | | | | EC |
| | 1476) | SVMHEALHNHYTQK | | | | | | (SEQ |
| | | SLSLSPG (SEQ | | | | | | ID |
| | | ID NO: 44) | | | | | | NO: |
| | | | | | | | | 45) |
| PMAB66 | EVQLLE | ASTKGPSVFPLAPS | GGGGSG | EVQLLESG | GGGGSG | DIQMTQS | DIVMTQS | RTVAA |
| | SGGGLV | SKSTSGGTAALGCL | GGGSGG | GGLVQPGG | GGGSGG | PSSLSAS | PDSLAVS | PSVFI |
| | QPGGSL | VKDYFPEPVTVSWN | GGS | SLRLSCAA | GGSGGG | VGDRVTI | LGERATI | FPPSD |
| | RLSCAA | SGALTSGVHTFPAV | (SEQ | SGFTFSSY | GS | TCRASQS | NCKSSQS | EQLKS |
| | SGFTFS | LQSSGLYSLSSVVT | ID NO: | WMHWVRQA | (SEQ | ISSSLAW | VLYSPNN | GTASV |
| | SYDMSW | VPSSSLGTQTYICN | 30) | PGKGLEWV | ID NO: | YQQKPGK | KNYLAWY | VCLLN |
| | VRQAPG | VNHKPSNTKVDKKV | | SYISGSGG | 22) | APKLLIY | QQKPGQP | NFYPR |
| | KGLEWV | EPKSCDKTHTCPPC | | YTNYADSV | | AASSLQS | PKLLIYW | EAKVQ |
| | SGITIS | PAPEAAGAPSVELE | | KGRFTISR | | GVPSRFS | ASTRESG | WKVDN |
| | GGSTYY | PPKPKDTLMISRTP | | DNSKNTLY | | GSGSGTD | VPDRFSG | ALQSG |
| | ADSVKG | EVTCVVVDVSHEDP | | LQMNSLRA | | FTLTISS | SGSGTDF | NSQES |
| | RFTISR | EVKFNWYVDGVEVH | | EDTAVYYC | | LQPEDFA | TLTISSL | VTEQD |
| | DNSKNT | NAKTKPREEQYNST | | ARDRPYYY | | TYYCQQY | QAEDVAV | SKDST |
| | LYLQMN | YRVVSVLTVLHQDW | | DLDVWGKG | | KSYPVTF | YYCQQYY | YSLSS |
| | SLRAED | LNGKEYKCKVSNKA | | TTVTVSS | | GQGTKVE | TTPPTFG | TLTLS |
| | TAVYYC | LPAPIEKTISKAKG | | (SEQ ID | | IK (SEQ | QGTRLEI | KADYE |
| | ARGRGG | QPREPQVYTLPPSR | | NO: | | ID NO: | K (SEQ | KHKVY |
| | SGWLDY | EEMTKNQVSLTCLV | | 1480) | | 1367) | ID NO: | ACEVT |
| | WGQGTT | KGFYPSDIAVEWES | | | | | 1359) | HQGLS |
| | VTVSS | NGQPENNYKTTPPV | | | | | | SPVTK |
| | (SEQ | LDSDGSFFLYSKLT | | | | | | SFNRG |
| | ID NO: | VDKSRWQQGNVFSC | | | | | | EC |
| | 1476) | SVMHEALHNHYTQK | | | | | | (SEQ |
| | | SLSLSPG (SEQ | | | | | | ID |
| | | ID NO: 44) | | | | | | NO: |
| | | | | | | | | 45) |
| PMAB67 | EVQLLE | ASTKGPSVFPLAPS | GGGGSG | EVQLLESG | GGGGSG | DIQMTQS | DIVMTQS | RTVAA |
| | SGGGLV | SKSTSGGTAALGCL | GGGSGG | GGLVQPGG | GGGSGG | PSSLSAS | PDSLAVS | PSVFI |
| | QPGGSL | VKDYFPEPVTVSWN | GGS | SLRLSCAA | GGSGGG | VGDRVTI | LGERATI | FPPSD |
| | RLSCAA | SGALTSGVHTFPAV | (SEQ | SGFTFSSY | GS | TCRASQS | NCKSSQS | EQLKS |
| | SGFTFS | LQSSGLYSLSSVVT | ID NO: | WMHWVRQA | (SEQ | ISSSLAW | VLYSPNN | GTASV |
| | SYDMSW | VPSSSLGTQTYICN | 30) | PGKCLEWV | ID NO: | YQQKPGK | KNYLAWY | VCLLN |
| | VRQAPG | VNHKPSNTKVDKKV | | SYISGSGG | 22) | APKLLIY | QQKPGQP | NFYPR |
| | KGLEWV | EPKSCDKTHTCPPC | | YTNYADSV | | AASSLQS | PKLLIYW | EAKVQ |
| | SGITIS | PAPEAAGAPSVELE | | KGRFTISR | | GVPSRFS | ASTRESG | WKVDN |
| | GGSTYY | PPKPKDTLMISRTP | | DNSKNTLY | | GSGSGTD | VPDRFSG | ALQSG |
| | ADSVKG | EVTCVVVDVSHEDP | | LQMNSLRA | | FTLTISS | SGSGTDF | NSQES |
| | RFTISR | EVKFNWYVDGVEVH | | EDTAVYYC | | LQPEDFA | TLTISSL | VTEQD |
| | DNSKNT | NAKTKPREEQYNST | | ARDRPYYY | | TYYCQQY | QAEDVAV | SKDST |
| | LYLQMN | YRVVSVLTVLHQDW | | DLDVWGKG | | KSYPVTF | YYCQQYY | YSLSS |
| | SLRAED | LNGKEYKCKVSNKA | | TTVTVSS | | GCGTKVE | TTPPTFG | TLTLS |
| | TAVYYC | LPAPIEKTISKAKG | | (SEQ ID | | IK (SEQ | QGTRLEI | KADYE |
| | ARGRGG | QPREPQVYTLPPSR | | NO: | | ID NO: | K (SEQ | KHKVY |
| | SGWLDY | EEMTKNQVSLTCLV | | 1545) | | 1543) | ID NO: | ACEVT |
| | WGQGTT | KGFYPSDIAVEWES | | | | | 1359) | HQGLS |
| | VTVSS | NGQPENNYKTTPPV | | | | | | SPVTK |
| | (SEQ | LDSDGSFFLYSKLT | | | | | | SFNRG |
| | ID NO: | VDKSRWQQGNVFSC | | | | | | EC |
| | 1476) | SVMHEALHNHYTQK | | | | | | (SEQ |
| | | SLSLSPG (SEQ | | | | | | ID |
| | | ID NO: 44) | | | | | | NO: |
| | | | | | | | | 45) |
| PMAB68 | EVQLLE | ASTKGPSVFPLAPS | GGGGSG | EVQLLESG | GGGGSG | DIQMTQS | DIVMTQS | RTVAA |
| | SGGGLV | SKSTSGGTAALGCL | GGGSGG | GGLVQPGG | GGGSGG | PSSLSAS | PDSLAVS | PSVFI |
| | QPGGSL | VKDYFPEPVTVSWN | GGS | SLRLSCAA | GGSGGG | VGDRVTI | LGERATI | FPPSD |
| | RLSCAA | SGALTSGVHTFPAV | (SEQ | SGFTFSSY | GS | TCRASQS | NCKSSQS | EQLKS |
| | SGFTFS | LQSSGLYSLSSVVT | ID NO: | WMHWVRQA | (SEQ | ISSSLAW | VLYSPNN | GTASV |
| | SYDMSW | VPSSSLGTQTYICN | 30) | PGKCLEWV | ID NO: | YQQKPGK | KNYLAWY | VCLLN |
| | VRQAPG | VNHKPSNTKVDKKV | | SYISGSGG | 22) | APKLLIY | QQKPGQP | NFYPR |
| | KGLEWV | EPKSCDKTHTCPPC | | YTNYADSV | | AASSLQS | PKLLIYW | EAKVQ |
| | SGITIS | PAPEAAGAPSVELE | | KGRFTISR | | GVPSRFS | ASTRESG | WKVDN |
| | GGSTYY | PPKPKDTLMISRTP | | DNSKNTLY | | GSGSGTD | VPDRFSG | ALQSG |
| | ADSVKG | EVTCVVVDVSHEDP | | LQMNSLRA | | FTLTISS | SGSGTDF | NSQES |
| | RFTISR | EVKFNWYVDGVEVH | | EDTAVYYC | | LQPEDFA | TLTISSL | VTEQD |
| | DNSKNT | NAKTKPREEQYNST | | ARDRPYYY | | TYYCQQY | QAEDVAV | SKDST |
| | LYLQMN | YRVVSVLTVLHQDW | | DMDVWGKG | | KSYPVTF | YYCQQYY | YSLSS |
| | SLRAED | LNGKEYKCKVSNKA | | TTVTVSS | | GCGTKVE | TTPPTFG | TLTLS |
| | TAVYYC | LPAPIEKTISKAKG | | (SEQ ID | | IK (SEQ | QGTRLEI | KADYE |
| | ARGRGG | QPREPQVYTLPPSR | | NO: | | ID NO: | K (SEQ | KHKVY |
| | SGWLDY | EEMTKNQVSLTCLV | | 1542) | | 1543) | ID NO: | ACEVT |
| | WGQGTT | KGFYPSDIAVEWES | | | | | 1359) | HQGLS |
| | VTVSS | NGQPENNYKTTPPV | | | | | | SPVTK |
| | (SEQ | LDSDGSFFLYSKLT | | | | | | SFNRG |
| | ID NO: | VDKSRWQQGNVFSC | | | | | | EC |
| | 1476) | SVMHEALHNHYTQK | | | | | | (SEQ |
| | | SLSLSPG (SEQ | | | | | | ID |
| | | ID NO: 44) | | | | | | NO: |
| | | | | | | | | 45) |
| PMAB69 | EVQLLE | ASTKGPSVFPLAPS | GGGGSG | EVQLLESG | GGGGSG | DIQMTQS | DIVMTQS | RTVAA |
| | SGGGLV | SKSTSGGTAALGCL | GGGSGG | GGLVQPGG | GGGSGG | PSSLSAS | PDSLAVS | PSVFI |
| | QPGGSL | VKDYFPEPVTVSWN | GGS | SLRLSCAA | GGSGGG | VGDRVTI | LGERATI | FPPSD |
| | RLSCAA | SGALTSGVHTFPAV | (SEQ | SGFTFSSY | GS | TCRASQS | NCKSSQS | EQLKS |
| | SGFTFS | LQSSGLYSLSSVVT | ID NO: | WMHWVRQA | (SEQ | ISSSLAW | VLYSPNN | GTASV |
| | SYDMSW | VPSSSLGTQTYICN | 30) | PGKGLEWV | ID NO: | YQQKPGK | KNYLAWY | VCLLN |
| | VRQAPG | VNHKPSNTKVDKKV | | SYISGSGG | 22) | APKLLIY | QQKPGQP | NFYPR |
| | KGLEWV | EPKSCDKTHTCPPC | | YTNYADSV | | AASSLQS | PKLLIYW | EAKVQ |
| | SGITIS | PAPEAAGAPSVELE | | KGRFTISR | | GVPSRFS | ASTRESG | WKVDN |
| | GGSTYY | PPKPKDTLMISRTP | | DNSKNTLY | | GSGSGTD | VPDRFSG | ALQSG |
| | HDSVKG | EVTCVVVDVSHEDP | | LQMNSLRA | | FTLTISS | SGSGTDF | NSQES |
| | RFTISR | EVKFNWYVDGVEVH | | EDTAVYYC | | LQPEDFA | TLTISSL | VTEQD |
| | DNSKNT | NAKTKPREEQYNST | | ARDRPYYY | | TYYCQQY | QAEDVAV | SKDST |
| | LYLQMN | YRVVSVLTVLHQDW | | DMDVWGKG | | KSYPVTF | YYCQQYY | YSLSS |
| | SLRAED | LNGKEYKCKVSNKA | | TTVTVSS | | GQGTKVE | TTPPTFG | TLTLS |
| | TAVYYC | LPAPIEKTISKAKG | | (SEQ ID | | IK (SEQ | QGTRLEI | KADYE |
| | ARGRGG | QPREPQVYTLPPSR | | NO: | | ID NO: | K (SEQ | KHKVY |
| | SGWLDY | EEMTKNQVSLTCLV | | 1445) | | 1367) | ID NO: | ACEVT |
| | WGQGTT | KGFYPSDIAVEWES | | | | | 1359) | HQGLS |
| | VTVSS | NGQPENNYKTTPPV | | | | | | SPVTK |
| | (SEQ | LDSDGSFFLYSKLT | | | | | | SFNRG |
| | ID NO: | VDKSRWQQGNVFSC | | | | | | EC |
| | 1547) | SVMHEALHNHYTQK | | | | | | (SEQ |
| | | SLSLSPG (SEQ | | | | | | ID |
| | | ID NO: 44) | | | | | | NO: |
| | | | | | | | | 45) |
| PMAB70 | EVQLLE | ASTKGPSVFPLAPS | GGGGSG | EVQLLESG | GGGGSG | DIQMTQS | DIVMTQS | RTVAA |
| | SGGGLV | SKSTSGGTAALGCL | GGGSGG | GGLVQPGG | GGGSGG | PSSLSAS | PDSLAVS | PSVFI |
| | QPGGSL | VKDYFPEPVTVSWN | GGS | SLRLSCAA | GGSGGG | VGDRVTI | LGERATI | FPPSD |
| | RLSCAA | SGALTSGVHTFPAV | (SEQ | SGFTFSSY | GS | TCRASQS | NCKSSQS | EQLKS |
| | SGFTFS | LQSSGLYSLSSVVT | ID NO: | WMHWVRQA | (SEQ | ISSSLAW | VLYSPNN | GTASV |
| | SYAMSW | VPSSSLGTQTYICN | 30) | PGKGLEWV | ID NO: | YQQKPGK | KNYLAWY | VCLLN |
| | VRQAPG | VNHKPSNTKVDKKV | | SYISGSGG | 22) | APKLLIY | QQKPGQP | NFYPR |
| | KGLEWV | EPKSCDKTHTCPPC | | YTNYADSV | | AASSLQS | PKLLIYW | EAKVQ |
| | SGISGS | PAPEAAGAPSVELE | | KGRFTISR | | GVPSRFS | ASTRESG | WKVDN |
| | GGSTYY | PPKPKDTLMISRTP | | DNSKNTLY | | GSGSGTD | VPDRFSG | ALQSG |
| | ADSVKG | EVTCVVVDVSHEDP | | LQMNSLRA | | FTLTISS | SGSGTDF | NSQES |
| | RFTISR | EVKFNWYVDGVEVH | | EDTAVYYC | | LQPEDFA | TLTISSL | VTEQD |
| | DNSKNT | NAKTKPREEQYNST | | ARDRPYYY | | TYYCQQY | QAEDVAV | SKDST |
| | LYLQMN | YRVVSVLTVLHQDW | | DMDVWGKG | | KSYPVTF | YYCQQYY | YSLSS |
| | SLRAED | LNGKEYKCKVSNKA | | TTVTVSS | | GQGTKVE | TTPPTFG | TLTLS |
| | TAVYYC | LPAPIEKTISKAKG | | (SEQ ID | | IK (SEQ | QGTRLEI | KADYE |
| | ARGRGG | QPREPQVYTLPPSR | | NO: | | ID NO: | K (SEQ | KHKVY |
| | SGWLDY | EEMTKNQVSLTCLV | | 1445) | | 1367) | ID NO: | ACEVT |
| | WGQGTT | KGFYPSDIAVEWES | | | | | 1359) | HQGLS |
| | VTVSS | NGQPENNYKTTPPV | | | | | | SPVTK |
| | (SEQ | LDSDGSFFLYSKLT | | | | | | SFNRG |
| | ID NO: | VDKSRWQQGNVFSC | | | | | | EC |
| | 1548) | SVMHEALHNHYTQK | | | | | | (SEQ |
| | | SLSLSPG (SEQ | | | | | | ID |
| | | ID NO: 44) | | | | | | NO: |
| | | | | | | | | 45) |
| PMAB71 | EVQLLE | ASTKGPSVFPLAPS | GGGGSG | EVQLLESG | GGGGSG | DIQMTQS | DIVMTQS | RTVAA |
| | SGGGLV | SKSTSGGTAALGCL | GGGSGG | GGLVQPGG | GGGSGG | PSSLSAS | PDSLAVS | PSVFI |
| | QPGGSL | VKDYFPEPVTVSWN | GGS | SLRLSCAA | GGSGGG | VGDRVTI | LGERATI | FPPSD |
| | RLSCAA | SGALTSGVHTFPAV | (SEQ | SGFTFSSY | GS | TCRASQS | NCKSSQS | EQLKS |
| | SGFTFS | LQSSGLYSLSSVVT | ID NO: | WMHWVRQA | (SEQ | ISSSLAW | VLYSPNN | GTASV |
| | SYSMSW | VPSSSLGTQTYICN | 30) | PGKGLEWV | ID NO: | YQQKPGK | KNYLAWY | VCLLN |
| | VRQAPG | VNHKPSNTKVDKKV | | SYISGSGG | 22) | APKLLIY | QQKPGQP | NFYPR |
| | KGLEWV | EPKSCDKTHTCPPC | | YTNYADSV | | AASSLQS | PKLLIYW | EAKVQ |
| | SAISGS | PAPEAAGAPSVELE | | KGRFTISR | | GVPSRFS | ASTRESG | WKVDN |
| | GGSTYY | PPKPKDTLMISRTP | | DNSKNTLY | | GSGSGTD | VPDRFSG | ALQSG |
| | ADSVKG | EVTCVVVDVSHEDP | | LQMNSLRA | | FTLTISS | SGSGTDF | NSQES |
| | RFTISR | EVKFNWYVDGVEVH | | EDTAVYYC | | LQPEDFA | TLTISSL | VTEQD |
| | DNSKNT | NAKTKPREEQYNST | | ARDRPYYY | | TYYCQQY | QAEDVAV | SKDST |
| | LYLQMN | YRVVSVLTVLHQDW | | DMDVWGKG | | KSYPVTF | YYCQQYY | YSLSS |
| | SLRAED | LNGKEYKCKVSNKA | | TTVTVSS | | GQGTKVE | TTPPTFG | TLTLS |
| | TAVYYC | LPAPIEKTISKAKG | | (SEQ ID | | IK (SEQ | QGTRLEI | KADYE |
| | ARGRGG | QPREPQVYTLPPSR | | NO: | | ID NO: | K (SEQ | KHKVY |
| | SGWLDY | EEMTKNQVSLTCLV | | 1445) | | 1367) | ID NO: | ACEVT |
| | WGQGTT | KGFYPSDIAVEWES | | | | | 1359) | HQGLS |
| | VTVSS | NGQPENNYKTTPPV | | | | | | SPVTK |
| | (SEQ | LDSDGSFFLYSKLT | | | | | | SFNRG |
| | ID NO: | VDKSRWQQGNVFSC | | | | | | EC |
| | 1549) | SVMHEALHNHYTQK | | | | | | (SEQ |
| | | SLSLSPG (SEQ | | | | | | ID |
| | | ID NO: 44) | | | | | | NO: |
| | | | | | | | | 45) |
| PMAB72 | EVQLLE | ASTKGPSVFPLAPS | GGGGSG | EVQLLESG | GGGGSG | DIQMTQS | DIVMTQS | RTVAA |
| | SGGGLV | SKSTSGGTAALGCL | GGGSGG | GGLVQPGG | GGGSGG | PSSLSAS | PDSLAVS | PSVFI |
| | QPGGSL | VKDYFPEPVTVSWN | GGS | SLRLSCAA | GGSGGG | VGDRVTI | LGERATI | FPPSD |
| | RLSCAA | SGALTSGVHTFPAV | (SEQ | SGFTFSSY | GS | TCRASQS | NCKSSQS | EQLKS |
| | SGFTFS | LQSSGLYSLSSVVT | ID NO: | WMHWVRQA | (SEQ | ISSSLAW | VLYSPNN | GTASV |
| | SYSMSW | VPSSSLGTQTYICN | 30) | PGKGLEWV | ID NO: | YQQKPGK | KNYLAWY | VCLLN |
| | VRQAPG | VNHKPSNTKVDKKV | | SYISGSGG | 22) | APKLLIY | QQKPGQP | NFYPR |
| | KGLEWV | EPKSCDKTHTCPPC | | YTNYADSV | | AASSLQS | PKLLIYW | EAKVQ |
| | SGISGS | PAPEAAGAPSVELE | | KGRFTISR | | GVPSRFS | ASTRESG | WKVDN |
| | GGSTYY | PPKPKDTLMISRTP | | DNSKNTLY | | GSGSGTD | VPDRFSG | ALQSG |
| | ADSVKG | EVTCVVVDVSHEDP | | LQMNSLRA | | FTLTISS | SGSGTDF | NSQES |
| | RFTISR | EVKFNWYVDGVEVH | | EDTAVYYC | | LQPEDFA | TLTISSL | VTEQD |
| | DNSKNT | NAKTKPREEQYNST | | ARDRPYYY | | TYYCQQY | QAEDVAV | SKDST |
| | LYLQMN | YRVVSVLTVLHQDW | | DMDVWGKG | | KSYPVTF | YYCQQYY | YSLSS |
| | SLRAED | LNGKEYKCKVSNKA | | TTVTVSS | | GQGTKVE | TTPPTFG | TLTLS |
| | TAVYYC | LPAPIEKTISKAKG | | (SEQ ID | | IK (SEQ | QGTRLEI | KADYE |
| | ARGRGG | QPREPQVYTLPPSR | | NO: | | ID NO: | K (SEQ | KHKVY |
| | SGWLDY | EEMTKNQVSLTCLV | | 1445) | | 1367) | ID NO: | ACEVT |
| | WGQGTT | KGFYPSDIAVEWES | | | | | 1359) | HQGLS |
| | VTVSS | NGQPENNYKTTPPV | | | | | | SPVTK |
| | (SEQ | LDSDGSFFLYSKLT | | | | | | SFNRG |
| | ID NO: | VDKSRWQQGNVFSC | | | | | | EC |
| | 1550) | SVMHEALHNHYTQK | | | | | | (SEQ |
| | | SLSLSPG (SEQ | | | | | | ID |
| | | ID NO: 44) | | | | | | NO: |
| | | | | | | | | 45) |
| PMAB73 | EVQLLE | ASTKGPSVFPLAPS | GGGGSG | EVQLLESG | GGGGSG | DIQMTQS | DIVMTQS | RTVAA |
| | SGGGLV | SKSTSGGTAALGCL | GGGSGG | GGLVQPGG | GGGSGG | PSSLSAS | PDSLAVS | PSVFI |
| | QPGGSL | VKDYFPEPVTVSWN | GGS | SLRLSCAA | GGSGGG | VGDRVTI | LGERATI | FPPSD |
| | RLSCAA | SGALTSGVHTFPAV | (SEQ | SGFTFSSY | GS | TCRASQS | NCKSSQS | EQLKS |
| | SGFTFS | LQSSGLYSLSSVVT | ID NO: | WMHWVRQA | (SEQ | ISSSLAW | VLYSPNN | GTASV |
| | SYDMSW | VPSSSLGTQTYICN | 30) | PGKGLEWV | ID NO: | YQQKPGK | KNYLAWY | VCLLN |
| | VRQAPG | VNHKPSNTKVDKKV | | SYISGSGG | 22) | APKLLIY | QQKPGQP | NFYPR |
| | KGLEWV | EPKSCDKTHTCPPC | | YTNYADSV | | AASSLQS | PKLLIYW | EAKVQ |
| | SAISGS | PAPEAAGAPSVELE | | KGRFTISR | | GVPSRFS | ASTRESG | WKVDN |
| | GGSTYY | PPKPKDTLMISRTP | | DNSKNTLY | | GSGSGTD | VPDRFSG | ALQSG |
| | ADSVKG | EVTCVVVDVSHEDP | | LQMNSLRA | | FTLTISS | SGSGTDF | NSQES |
| | RFTISR | EVKFNWYVDGVEVH | | EDTAVYYC | | LQPEDFA | TLTISSL | VTEQD |
| | DNSKNT | NAKTKPREEQYNST | | ARDRPYYY | | TYYCQQY | QAEDVAV | SKDST |
| | LYLQMN | YRVVSVLTVLHQDW | | DMDVWGKG | | KSYPVTF | YYCQQYY | YSLSS |
| | SLRAED | LNGKEYKCKVSNKA | | TTVTVSS | | GQGTKVE | TTPPTFG | TLTLS |
| | TAVYYC | LPAPIEKTISKAKG | | (SEQ ID | | IK (SEQ | QGTRLEI | KADYE |
| | ARGRGG | QPREPQVYTLPPSR | | NO: | | ID NO: | K (SEQ | KHKVY |
| | SGWLDY | EEMTKNQVSLTCLV | | 1445) | | 1367) | ID NO: | ACEVT |
| | WGQGTT | KGFYPSDIAVEWES | | | | | 1359) | HQGLS |
| | VTVSS | NGQPENNYKTTPPV | | | | | | SPVTK |
| | (SEQ | LDSDGSFFLYSKLT | | | | | | SFNRG |
| | ID NO: | VDKSRWQQGNVFSC | | | | | | EC |
| | 1551) | SVMHEALHNHYTQK | | | | | | (SEQ |
| | | SLSLSPG (SEQ | | | | | | ID |
| | | ID NO: 44) | | | | | | NO: |
| | | | | | | | | 45) |
| PMAB74 | EVQLLE | ASTKGPSVFPLAPS | GGGGSG | EVQLLESG | GGGGSG | DIQMTQS | DIVMTQS | RTVAA |
| | SGGGLV | SKSTSGGTAALGCL | GGGSGG | GGLVQPGG | GGGSGG | PSSLSAS | PDSLAVS | PSVFI |
| | QPGGSL | VKDYFPEPVTVSWN | GGS | SLRLSCAA | GGSGGG | VGDRVTI | LGERATI | FPPSD |
| | RLSCAA | SGALTSGVHTFPAV | (SEQ | SGFTFSSY | GS | TCRASQS | NCKSSQS | EQLKS |
| | SGFTFS | LQSSGLYSLSSVVT | ID NO: | WMHWVRQA | (SEQ | ISSSLAW | VLYSPNN | GTASV |
| | SYDMSW | VPSSSLGTQTYICN | 30) | PGKGLEWV | ID NO: | YQQKPGK | KNYLAWY | VCLLN |
| | VRQAPG | VNHKPSNTKVDKKV | | SYISGSGG | 22) | APKLLIY | QQKPGQP | NFYPR |
| | KGLEWV | EPKSCDKTHTCPPC | | YTNYADSV | | AASSLQS | PKLLIYW | EAKVQ |
| | SGITIS | PAPEAAGAPSVELE | | KGRFTISR | | GVPSRFS | ASTRESG | WKVDN |
| | GQSTYY | PPKPKDTLMISRTP | | DNSKNTLY | | GSGSGTD | VPDRFSG | ALQSG |
| | ADSVKG | EVTCVVVDVSHEDP | | LQMNSLRA | | FTLTISS | SGSGTDF | NSQES |
| | RFTISR | EVKFNWYVDGVEVH | | EDTAVYYC | | LQPEDFA | TLTISSL | VTEQD |
| | DNSKNT | NAKTKPREEQYNST | | ARDRPYYY | | TYYCQQY | QAEDVAV | SKDST |
| | LYLQMN | YRVVSVLTVLHQDW | | DMDVWGKG | | KSYPVTF | YYCQQYY | YSLSS |
| | SLRAED | LNGKEYKCKVSNKA | | TTVTVSS | | GQGTKVE | TTPPTFG | TLTLS |
| | TAVYYC | LPAPIEKTISKAKG | | (SEQ ID | | IK (SEQ | QGTRLEI | KADYE |
| | ARGRGG | QPREPQVYTLPPSR | | NO: | | ID NO: | K (SEQ | KHKVY |
| | SGWLDY | EEMTKNQVSLTCLV | | 1445) | | 1367) | ID NO: | ACEVT |
| | WGQGTT | KGFYPSDIAVEWES | | | | | 1359) | HQGLS |
| | VTVSS | NGQPENNYKTTPPV | | | | | | SPVTK |
| | (SEQ | LDSDGSFFLYSKLT | | | | | | SFNRG |
| | ID NO: | VDKSRWQQGNVFSC | | | | | | EC |
| | 1552) | SVMHEALHNHYTQK | | | | | | (SEQ |
| | | SLSLSPG (SEQ | | | | | | ID |
| | | ID NO: 44) | | | | | | NO: |
| | | | | | | | | 45) |
| PMAB75 | EVQLLE | ASTKGPSVFPLAPS | GGGGSG | EVQLLESG | GGGGSG | DIQMTQS | DIVMTQS | RTVAA |
| | SGGGLV | SKSTSGGTAALGCL | GGGSGG | GGLVQPGG | GGGSGG | PSSLSAS | PDSLAVS | PSVFI |
| | QPGGSL | VKDYFPEPVTVSWN | GGS | SLRLSCAA | GGSGGG | VGDRVTI | LGERATI | FPPSD |
| | RLSCAA | SGALTSGVHTFPAV | (SEQ | SGFTFSSY | GS | TCRASQS | NCKSSQS | EQLKS |
| | SGFTFS | LQSSGLYSLSSVVT | ID NO: | WMHWVRQA | (SEQ | ISSSLAW | VLYSPNN | GTASV |
| | SYDMSW | VPSSSLGTQTYICN | 30) | PGKGLEWV | ID NO: | YQQKPGK | KNYLAWY | VCLLN |
| | VRQAPG | VNHKPSNTKVDKKV | | SYISGSGG | 22) | APKLLIY | QQKPGQP | NFYPR |
| | KGLEWV | EPKSCDKTHTCPPC | | YTNYADSV | | AASSLQS | PKLLIYW | EAKVQ |
| | SGITIS | PAPEAAGAPSVELE | | KGRFTISR | | GVPSRFS | ASTRESG | WKVDN |
| | GWSTYY | PPKPKDTLMISRTP | | DNSKNTLY | | GSGSGTD | VPDRFSG | ALQSG |
| | ADSVKG | EVTCVVVDVSHEDP | | LQMNSLRA | | FTLTISS | SGSGTDF | NSQES |
| | RFTISR | EVKFNWYVDGVEVH | | EDTAVYYC | | LQPEDFA | TLTISSL | VTEQD |
| | DNSKNT | NAKTKPREEQYNST | | ARDRPYYY | | TYYCQQY | QAEDVAV | SKDST |
| | LYLQMN | YRVVSVLTVLHQDW | | DMDVWGKG | | KSYPVTF | YYCQQYY | YSLSS |
| | SLRAED | LNGKEYKCKVSNKA | | TTVTVSS | | GQGTKVE | TTPPTFG | TLTLS |
| | TAVYYC | LPAPIEKTISKAKG | | (SEQ ID | | IK (SEQ | QGTRLEI | KADYE |
| | ARGRGG | QPREPQVYTLPPSR | | NO: | | ID NO: | K (SEQ | KHKVY |
| | SGWLDY | EEMTKNQVSLTCLV | | 1445) | | 1367) | ID NO: | ACEVT |
| | WGQGTT | KGFYPSDIAVEWES | | | | | 1359) | HQGLS |
| | VTVSS | NGQPENNYKTTPPV | | | | | | SPVTK |
| | (SEQ | LDSDGSFFLYSKLT | | | | | | SFNRG |
| | ID NO: | VDKSRWQQGNVFSC | | | | | | EC |
| | 1553) | SVMHEALHNHYTQK | | | | | | (SEQ |
| | | SLSLSPG (SEQ | | | | | | ID |
| | | ID NO: 44) | | | | | | NO: |
| | | | | | | | | 45) |
| PMAB76 | EVQLLE | ASTKGPSVFPLAPS | GGGGSG | EVQLLESG | GGGGSG | DIQMTQS | DIVMTQS | RTVAA |
| | SGGGLV | SKSTSGGTAALGCL | GGGSGG | GGLVQPGG | GGGSGG | PSSLSAS | PDSLAVS | PSVFI |
| | QPGGSL | VKDYFPEPVTVSWN | GGS | SLRLSCAA | GGSGGG | VGDRVTI | LGERATI | FPPSD |
| | RLSCAA | SGALTSGVHTFPAV | (SEQ | SGFTFSSY | GS | TCRASQS | NCKSSQS | EQLKS |
| | SGFTFS | LQSSGLYSLSSVVT | ID NO: | WMHWVRQA | (SEQ | ISSSLAW | VLYSPNN | GTASV |
| | SYDMSW | VPSSSLGTQTYICN | 30) | PGKGLEWV | ID NO: | YQQKPGK | KNYLAWY | VCLLN |
| | VRQAPG | VNHKPSNTKVDKKV | | SYISGSGG | 22) | APKLLIY | QQKPGQP | NFYPR |
| | KGLEWV | EPKSCDKTHTCPPC | | YTNYADSV | | AASSLQS | PKLLIYW | EAKVQ |
| | SGITIS | PAPEAAGAPSVELE | | KGRFTISR | | GVPSRFS | ASTRESG | WKVDN |
| | GGSTYY | PPKPKDTLMISRTP | | DNSKNTLY | | GSGSGTD | VPDRFSG | ALQSG |
| | ADSVKG | EVTCVVVDVSHEDP | | LQMNSLRA | | FTLTISS | SGSGTDF | NSQES |
| | RFTISR | EVKFNWYVDGVEVH | | EDTAVYYC | | LQPEDFA | TLTISSL | VTEQD |
| | DNSKNT | NAKTKPREEQYNST | | ARDRPYYY | | TYYCQQY | QAEDVAV | SKDST |
| | LYLQMN | YRVVSVLTVLHQDW | | DMDVWGKG | | KSYPVTF | YYCQQYY | YSLSS |
| | SLRAED | LNGKEYKCKVSNKA | | TTVTVSS | | GQGTKVE | TTPPTFG | TLTLS |
| | TAVYYC | LPAPIEKTISKAKG | | (SEQ ID | | IK (SEQ | QGTRLEI | KADYE |
| | ARGRGG | QPREPQVYTLPPSR | | NO: | | ID NO: | K (SEQ | KHKVY |
| | SGWFDY | EEMTKNQVSLTCLV | | 1445) | | 1367) | ID NO: | ACEVT |
| | WGQGTT | KGFYPSDIAVEWES | | | | | 1359) | HQGLS |
| | VTVSS | NGQPENNYKTTPPV | | | | | | SPVTK |
| | (SEQ | LDSDGSFFLYSKLT | | | | | | SFNRG |
| | ID NO: | VDKSRWQQGNVFSC | | | | | | EC |
| | 1554) | SVMHEALHNHYTQK | | | | | | (SEQ |
| | | SLSLSPG (SEQ | | | | | | ID |
| | | ID NO: 44) | | | | | | NO: |
| | | | | | | | | 45) |
| PMAB77 | EVQLLE | ASTKGPSVFPLAPS | GGGGSG | EVQLLESG | GGGGSG | DIQMTQS | DIVMTQS | RTVAA |
| | SGGGLV | SKSTSGGTAALGCL | GGGSGG | GGLVQPGG | GGGSGG | PSSLSAS | PDSLAVS | PSVFI |
| | QPGGSL | VKDYFPEPVTVSWN | GGS | SLRLSCAA | GGSGGG | VGDRVTI | LGERATI | FPPSD |
| | RLSCAA | SGALTSGVHTFPAV | (SEQ | SGFTFSSY | GS | TCRASQS | NCKSSQS | EQLKS |
| | SGFTFS | LQSSGLYSLSSVVT | ID NO: | WMHWVRQA | (SEQ | ISSSLAW | VLYSPNN | GTASV |
| | SYDMSW | VPSSSLGTQTYICN | 30) | PGKGLEWV | ID NO: | YQQKPGK | KNYLAWY | VCLLN |
| | VRQAPG | VNHKPSNTKVDKKV | | SYISGSGG | 22) | APKLLIY | QQKPGQP | NFYPR |
| | KGLEWV | EPKSCDKTHTCPPC | | YTNYADSV | | AASSLQS | PKLLIYW | EAKVQ |
| | SGITIS | PAPEAAGAPSVELE | | KGRFTISR | | GVPSRFS | ASTRESG | WKVDN |
| | GGSTYY | PPKPKDTLMISRTP | | DNSKNTLY | | GSGSGTD | VPDRFSG | ALQSG |
| | ADSVKG | EVTCVVVDVSHEDP | | LQMNSLRA | | FTLTISS | SGSGTDF | NSQES |
| | RFTISR | EVKFNWYVDGVEVH | | EDTAVYYC | | LQPEDFA | TLTISSL | VTEQD |
| | DNSKNT | NAKTKPREEQYNST | | ARDRPYYY | | TYYCQQY | QAEDVAV | SKDST |
| | LYLQMN | YRVVSVLTVLHQDW | | DMDVWGKG | | KSYPVTF | YYCQQYY | YSLSS |
| | SLRAED | LNGKEYKCKVSNKA | | TTVTVSS | | GQGTKVE | TTPPTFG | TLTLS |
| | TAVYYC | LPAPIEKTISKAKG | | (SEQ ID | | IK (SEQ | QGTRLEI | KADYE |
| | ARGRGG | QPREPQVYTLPPSR | | NO: | | ID NO: | K (SEQ | KHKVY |
| | SGWLDY | EEMTKNQVSLTCLV | | 1445) | | 1367) | ID NO: | ACEVT |
| | WGKGTT | KGFYPSDIAVEWES | | | | | 1359) | HQGLS |
| | VTVSS | NGQPENNYKTTPPV | | | | | | SPVTK |
| | (SEQ | LDSDGSFFLYSKLT | | | | | | SFNRG |
| | ID NO: | VDKSRWQQGNVFSC | | | | | | EC |
| | 1555) | SVMHEALHNHYTQK | | | | | | (SEQ |
| | | SLSLSPG (SEQ | | | | | | ID |
| | | ID NO: 44) | | | | | | NO: |
| | | | | | | | | 45) |
| PMAB78 | EVQLLE | ASTKGPSVFPLAPS | GGGGSG | EVQLLESG | GGGGSG | DIQMTQS | DIVMTQS | RTVAA |
| | SGGGLV | SKSTSGGTAALGCL | GGGSGG | GGLVQPGG | GGGSGG | PSSLSAS | PDSLAVS | PSVFI |
| | QPGGSL | VKDYFPEPVTVSWN | GGS | SLRLSCAA | GGSGGG | VGDRVTI | LGERATI | FPPSD |
| | RLSCAA | SGALTSGVHTFPAV | (SEQ | SGFTFSSY | GS | TCRASQS | NCKSSQS | EQLKS |
| | SGFTFS | LQSSGLYSLSSVVT | ID NO: | WMHWVRQA | (SEQ | ISSSLAW | VLYSPNN | GTASV |
| | YYDMSW | VPSSSLGTQTYICN | 30) | PGKGLEWV | ID NO: | YQQKPGK | KNYLAWY | VCLLN |
| | VRQAPG | VNHKPSNTKVDKKV | | SYISGSGG | 22) | APKLLIY | QQKPGQP | NFYPR |
| | KGLEWV | EPKSCDKTHTCPPC | | YTNYADSV | | AASSLQS | PKLLIYW | EAKVQ |
| | SGITIS | PAPEAAGAPSVELE | | KGRFTISR | | GVPSRFS | ASTRESG | WKVDN |
| | GGSTYY | PPKPKDTLMISRTP | | DNSKNTLY | | GSGSGTD | VPDRFSG | ALQSG |
| | ADSVKG | EVTCVVVDVSHEDP | | LQMNSLRA | | FTLTISS | SGSGTDF | NSQES |
| | RFTISR | EVKFNWYVDGVEVH | | EDTAVYYC | | LQPEDFA | TLTISSL | VTEQD |
| | DNSKNT | NAKTKPREEQYNST | | ARDRPYYY | | TYYCQQY | QAEDVAV | SKDST |
| | LYLQMN | YRVVSVLTVLHQDW | | DMDVWGKG | | KSYPVTF | YYCQQYY | YSLSS |
| | SLRAED | LNGKEYKCKVSNKA | | TTVTVSS | | GQGTKVE | TTPPTFG | TLTLS |
| | TAVYYC | LPAPIEKTISKAKG | | (SEQ ID | | IK (SEQ | QGTRLEI | KADYE |
| | ARGRGG | QPREPQVYTLPPSR | | NO: | | ID NO: | K (SEQ | KHKVY |
| | SGWLDY | EEMTKNQVSLTCLV | | 1445) | | 1367) | ID NO: | ACEVT |
| | WGQGTT | KGFYPSDIAVEWES | | | | | 1359) | HQGLS |
| | VTVSS | NGQPENNYKTTPPV | | | | | | SPVTK |
| | (SEQ | LDSDGSFFLYSKLT | | | | | | SFNRG |
| | ID NO: | VDKSRWQQGNVFSC | | | | | | EC |
| | 1556) | SVMHEALHNHYTQK | | | | | | (SEQ |
| | | SLSLSPG (SEQ | | | | | | ID |
| | | ID NO: 44) | | | | | | NO: |
| | | | | | | | | 45) |
| PMAB79 | EVQLLE | ASTKGPSVFPLAPS | GGGGSG | EVQLLESG | GGGGSG | DIQMTQS | DIVMTQS | RTVAA |
| | SGGGLV | SKSTSGGTAALGCL | GGGSGG | GGLVQPGG | GGGSGG | PSSLSAS | PDSLAVS | PSVFI |
| | QPGGSL | VKDYFPEPVTVSWN | GGS | SLRLSCAA | GGSGGG | VGDRVTI | LGERATI | FPPSD |
| | RLSCAA | SGALTSGVHTFPAV | (SEQ | SGFTFSSY | GS | TCRASQS | NCKSSQS | EQLKS |
| | SGFTFS | LQSSGLYSLSSVVT | ID NO: | WMHWVRQA | (SEQ | ISSSLAW | VLYSPNN | GTASV |
| | SYDMSW | VPSSSLGTQTYICN | 30) | PGKGLEWV | ID NO: | YQQKPGK | KNYLAWY | VCLLN |
| | VRQAPG | VNHKPSNTKVDKKV | | SYISGSGG | 22) | APKLLIY | QQKPGQP | NFYPR |
| | KGLEWV | EPKSCDKTHTCPPC | | YTNYADSV | | AASSLQS | PKLLIYW | EAKVQ |
| | SGITIS | PAPEAAGAPSVELE | | KGRFTISR | | GVPSRFS | ASTRESG | WKVDN |
| | GGDTYY | PPKPKDTLMISRTP | | DNSKNTLY | | GSGSGTD | VPDRFSG | ALQSG |
| | ADSVKG | EVTCVVVDVSHEDP | | LQMNSLRA | | FTLTISS | SGSGTDF | NSQES |
| | RFTISR | EVKFNWYVDGVEVH | | EDTAVYYC | | LQPEDFA | TLTISSL | VTEQD |
| | DNSKNT | NAKTKPREEQYNST | | ARDRPYYY | | TYYCQQY | QAEDVAV | SKDST |
| | LYLQMN | YRVVSVLTVLHQDW | | DMDVWGKG | | KSYPVTF | YYCQQYY | YSLSS |
| | SLRAED | LNGKEYKCKVSNKA | | TTVTVSS | | GQGTKVE | TTPPTFG | TLTLS |
| | TAVYYC | LPAPIEKTISKAKG | | (SEQ ID | | IK (SEQ | QGTRLEI | KADYE |
| | ARGRGG | QPREPQVYTLPPSR | | NO: | | ID NO: | K (SEQ | KHKVY |
| | SGWLDY | EEMTKNQVSLTCLV | | 1445) | | 1367) | ID NO: | ACEVT |
| | WGQGTT | KGFYPSDIAVEWES | | | | | 1359) | HQGLS |
| | VTVSS | NGQPENNYKTTPPV | | | | | | SPVTK |
| | (SEQ | LDSDGSFFLYSKLT | | | | | | SFNRG |
| | ID NO: | VDKSRWQQGNVFSC | | | | | | EC |
| | 1557) | SVMHEALHNHYTQK | | | | | | (SEQ |
| | | SLSLSPG (SEQ | | | | | | ID |
| | | ID NO: 44) | | | | | | NO: |
| | | | | | | | | 45) |
| PMAB80 | EVQLLE | ASTKGPSVFPLAPS | GGGGSG | EVQLLESG | GGGGSG | DIQMTQS | DIVMTQS | RTVAA |
| | SGGGLV | SKSTSGGTAALGCL | GGGSGG | GGLVQPGG | GGGSGG | PSSLSAS | PDSLAVS | PSVFI |
| | QPGGSL | VKDYFPEPVTVSWN | GGS | SLRLSCAA | GGSGGG | VGDRVTI | LGERATI | FPPSD |
| | RLSCAA | SGALTSGVHTFPAV | (SEQ | SGFTFSSY | GS | TCRASQS | NCKSSQS | EQLKS |
| | SGFTFS | LQSSGLYSLSSVVT | ID NO: | WMHWVRQA | (SEQ | ISSSLAW | VLYSPNN | GTASV |
| | SYDMSW | VPSSSLGTQTYICN | 30) | PGKGLEWV | ID NO: | YQQKPGK | KNYLAWY | VCLLN |
| | VRQAPG | VNHKPSNTKVDKKV | | SYISGSGG | 22) | APKLLIY | QQKPGQP | NFYPR |
| | KGLEWV | EPKSCDKTHTCPPC | | YTNYADSV | | AASSLQS | PKLLIYW | EAKVQ |
| | SGITIS | PAPEAAGAPSVELE | | KGRFTISR | | GVPSRFS | ASTRESG | WKVDN |
| | GGNTYY | PPKPKDTLMISRTP | | DNSKNTLY | | GSGSGTD | VPDRFSG | ALQSG |
| | ADSVKG | EVTCVVVDVSHEDP | | LQMNSLRA | | FTLTISS | SGSGTDF | NSQES |
| | RFTISR | EVKFNWYVDGVEVH | | EDTAVYYC | | LQPEDFA | TLTISSL | VTEQD |
| | DNSKNT | NAKTKPREEQYNST | | ARDRPYYY | | TYYCQQY | QAEDVAV | SKDST |
| | LYLQMN | YRVVSVLTVLHQDW | | DMDVWGKG | | KSYPVTF | YYCQQYY | YSLSS |
| | SLRAED | LNGKEYKCKVSNKA | | TTVTVSS | | GQGTKVE | TTPPTFG | TLTLS |
| | TAVYYC | LPAPIEKTISKAKG | | (SEQ ID | | IK (SEQ | QGTRLEI | KADYE |
| | ARGRGG | QPREPQVYTLPPSR | | NO: | | ID NO: | K (SEQ | KHKVY |
| | SGWLDY | EEMTKNQVSLTCLV | | 1445) | | 1367) | ID NO: | ACEVT |
| | WGQGTT | KGFYPSDIAVEWES | | | | | 1359) | HQGLS |
| | VTVSS | NGQPENNYKTTPPV | | | | | | SPVTK |
| | (SEQ | LDSDGSFFLYSKLT | | | | | | SFNRG |
| | ID NO: | VDKSRWQQGNVFSC | | | | | | EC |
| | 1558) | SVMHEALHNHYTQK | | | | | | (SEQ |
| | | SLSLSPG (SEQ | | | | | | ID |
| | | ID NO: 44) | | | | | | NO: |
| | | | | | | | | 45) |
| PMAB81 | EVQLLE | ASTKGPSVFPLAPS | GGGGSG | EVQLLESG | GGGGSG | DIQMTQS | DIVMTQS | RTVAA |
| | SGGGLV | SKSTSGGTAALGCL | GGGSGG | GGLVQPGG | GGGSGG | PSSLSAS | PDSLAVS | PSVFI |
| | QPGGSL | VKDYFPEPVTVSWN | GGS | SLRLSCAA | GGSGGG | VGDRVTI | LGERATI | FPPSD |
| | RLSCAA | SGALTSGVHTFPAV | (SEQ | SGFTFSSY | GS | TCRASQS | NCKSSQS | EQLKS |
| | SGFPFS | LQSSGLYSLSSVVT | ID NO: | WMHWVRQA | (SEQ | ISSSLAW | VLYSPNN | GTASV |
| | SYDMSW | VPSSSLGTQTYICN | 30) | PGKGLEWV | ID NO: | YQQKPGK | KNYLAWY | VCLLN |
| | VRQAPG | VNHKPSNTKVDKKV | | SYISGSGG | 22) | APKLLIY | QQKPGQP | NFYPR |
| | KGLEWV | EPKSCDKTHTCPPC | | YTNYADSV | | AASSLQS | PKLLIYW | EAKVQ |
| | SGITIS | PAPEAAGAPSVELE | | KGRFTISR | | GVPSRFS | ASTRESG | WKVDN |
| | GGSTYY | PPKPKDTLMISRTP | | DNSKNTLY | | GSGSGTD | VPDRFSG | ALQSG |
| | ADSVKG | EVTCVVVDVSHEDP | | LQMNSLRA | | FTLTISS | SGSGTDF | NSQES |
| | RFTISR | EVKFNWYVDGVEVH | | EDTAVYYC | | LQPEDFA | TLTISSL | VTEQD |
| | DNSKNT | NAKTKPREEQYNST | | ARDRPYYY | | TYYCQQY | QAEDVAV | SKDST |
| | LYLQMN | YRVVSVLTVLHQDW | | DMDVWGKG | | KSYPVTF | YYCQQYY | YSLSS |
| | SLRAED | LNGKEYKCKVSNKA | | TTVTVSS | | GQGTKVE | TTPPTFG | TLTLS |
| | TAVYYC | LPAPIEKTISKAKG | | (SEQ ID | | IK (SEQ | QGTRLEI | KADYE |
| | ARGRGG | QPREPQVYTLPPSR | | NO: | | ID NO: | K (SEQ | KHKVY |
| | SGWLDY | EEMTKNQVSLTCLV | | 1445) | | 1367) | ID NO: | ACEVT |
| | WGQGTT | KGFYPSDIAVEWES | | | | | 1359) | HQGLS |
| | VTVSS | NGQPENNYKTTPPV | | | | | | SPVTK |
| | (SEQ | LDSDGSFFLYSKLT | | | | | | SFNRG |
| | ID NO: | VDKSRWQQGNVFSC | | | | | | EC |
| | 1559) | SVMHEALHNHYTQK | | | | | | (SEQ |
| | | SLSLSPG (SEQ | | | | | | ID |
| | | ID NO: 44) | | | | | | NO: |
| | | | | | | | | 45) |
| PMAB82 | EVQLLE | ASTKGPSVFPLAPS | GGGGSG | EVQLLESG | GGGGSG | DIQMTQS | DIVMTQS | RTVAA |
| | SGGGLV | SKSTSGGTAALGCL | GGGSGG | GGLVQPGG | GGGSGG | PSSLSAS | PDSLAVS | PSVFI |
| | QPGGSL | VKDYFPEPVTVSWN | GGS | SLRLSCAA | GGSGGG | VGDRVTI | LGERATI | FPPSD |
| | RLSCAA | SGALTSGVHTFPAV | (SEQ | SGFTFSSY | GS | TCRASQS | NCKSSQS | EQLKS |
| | SGFTFS | LQSSGLYSLSSVVT | ID NO: | WMHWVRQA | (SEQ | ISSSLAW | VLYSPNN | GTASV |
| | SYDMSW | VPSSSLGTQTYICN | 30) | PGKGLEWV | ID NO: | YQQKPGK | KNYLAWY | VCLLN |
| | VRQAPG | VNHKPSNTKVDKKV | | SYISGSGG | 22) | APKLLIY | QQKPGQP | NFYPR |
| | KGLEWV | EPKSCDKTHTCPPC | | YTNYADSV | | AASSLQS | PKLLIYW | EAKVQ |
| | SGITIS | PAPEAAGAPSVELE | | KGRFTISR | | GVPSRFS | ASTRFSG | WKVDN |
| | GGSTYY | PPKPKDTLMISRTP | | DNSKNTLY | | GSGSGTD | VPDRFSG | ALQSG |
| | ADSVKG | EVTCVVVDVSHEDP | | LQMNSLRA | | FTLTISS | SGSGTDF | NSQES |
| | RFTISR | EVKFNWYVDGVEVH | | EDTAVYYC | | LQPEDFA | TLTISSL | VTEQD |
| | DNSKNT | NAKTKPREEQYNST | | ARDRPYYY | | TYYCQQY | QAEDVAV | SKDST |
| | LYLQMN | YRVVSVLTVLHQDW | | DMDVWGKG | | KSYPVTF | YYCQQYY | YSLSS |
| | SLRAED | LNGKEYKCKVSNKA | | TTVTVSS | | GQGTKVE | TTPPTFG | TLTLS |
| | TAVYYC | LPAPIEKTISKAKG | | (SEQ ID | | IK (SEQ | QGTRLEI | KADYE |
| | ARGRGG | QPREPQVYTLPPSR | | NO: | | ID NO: | K (SEQ | KHKVY |
| | SGWLDY | EEMTKNQVSLTCLV | | 1445) | | 1367) | ID NO: | ACEVT |
| | WGQGTT | KGFYPSDIAVEWES | | | | | 1560) | HQGLS |
| | VTVSS | NGQPENNYKTTPPV | | | | | | SPVTK |
| | (SEQ | LDSDGSFFLYSKLT | | | | | | SFNRG |
| | ID NO: | VDKSRWQQGNVFSC | | | | | | EC |
| | 1476) | SVMHEALHNHYTQK | | | | | | (SEQ |
| | | SLSLSPG (SEQ | | | | | | ID |
| | | ID NO: 44) | | | | | | NO: |
| | | | | | | | | 45) |
| PMAB83 | EVQLLE | ASTKGPSVFPLAPS | GGGGSG | EVQLLESG | GGGGSG | DIQMTQS | DIVMTQS | RTVAA |
| | SGGGLV | SKSTSGGTAALGCL | GGGSGG | GGLVQPGG | GGGSGG | PSSLSAS | PDSLAVS | PSVFI |
| | QPGGSL | VKDYFPEPVTVSWN | GGS | SLRLSCAA | GGSGGG | VGDRVTI | LGERATI | FPPSD |
| | RLSCAA | SGALTSGVHTFPAV | (SEQ | SGFTFSSY | GS | TCRASQS | NCKSSQS | EQLKS |
| | SGFTFS | LQSSGLYSLSSVVT | ID NO: | WMHWVRQA | (SEQ | ISSSLAW | VLYSPNN | GTASV |
| | SYDMSW | VPSSSLGTQTYICN | 30) | PGKGLEWV | ID NO: | YQQKPGK | KNYLAWY | VCLLN |
| | VRQAPG | VNHKPSNTKVDKKV | | SYISGSGG | 22) | APKLLIY | QQKPGQP | NFYPR |
| | KGLEWV | EPKSCDKTHTCPPC | | YTNYADSV | | AASSLQS | PKLLIYW | EAKVQ |
| | SGITIS | PAPEAAGAPSVELE | | KGRFTISR | | GVPSRFS | ASTRKSG | WKVDN |
| | GGSTYY | PPKPKDTLMISRTP | | DNSKNTLY | | GSGSGTD | VPDRFSG | ALQSG |
| | ADSVKG | EVTCVVVDVSHEDP | | LQMNSLRA | | FTLTISS | SGSGTDF | NSQES |
| | RFTISR | EVKFNWYVDGVEVH | | EDTAVYYC | | LQPEDFA | TLTISSL | VTEQD |
| | DNSKNT | NAKTKPREEQYNST | | ARDRPYYY | | TYYCQQY | QAEDVAV | SKDST |
| | LYLQMN | YRVVSVLTVLHQDW | | DMDVWGKG | | KSYPVTF | YYCQQYY | YSLSS |
| | SLRAED | LNGKEYKCKVSNKA | | TTVTVSS | | GQGTKVE | TTPPTFG | TLTLS |
| | TAVYYC | LPAPIEKTISKAKG | | (SEQ ID | | IK (SEQ | QGTRLEI | KADYE |
| | ARGRGG | QPREPQVYTLPPSR | | NO: | | ID NO: | K (SEQ | KHKVY |
| | SGWLDY | EEMTKNQVSLTCLV | | 1445) | | 1367) | ID NO: | ACEVT |
| | WGQGTT | KGFYPSDIAVEWES | | | | | 1561) | HQGLS |
| | VTVSS | NGQPENNYKTTPPV | | | | | | SPVTK |
| | (SEQ | LDSDGSFFLYSKLT | | | | | | SFNRG |
| | ID NO: | VDKSRWQQGNVFSC | | | | | | EC |
| | 1476) | SVMHEALHNHYTQK | | | | | | (SEQ |
| | | SLSLSPG (SEQ | | | | | | ID |
| | | ID NO: 44) | | | | | | NO: |
| | | | | | | | | 45) |
| PMAB84 | EVQLLE | ASTKGPSVFPLAPS | GGGGSG | EVQLLESG | GGGGSG | DIQMTQS | DIVMTQS | RTVAA |
| | SGGGLV | SKSTSGGTAALGCL | GGGSGG | GGLVQPGG | GGGSGG | PSSLSAS | PDSLAVS | PSVFI |
| | QPGGSL | VKDYFPEPVTVSWN | GGS | SLRLSCAA | GGSGGG | VGDRVTI | LGERATI | FPPSD |
| | RLSCAA | SGALTSGVHTFPAV | (SEQ | SGFTFSSY | GS | TCRASQS | NCKSSQS | EQLKS |
| | SGFTFS | LQSSGLYSLSSVVT | ID NO: | WMHWVRQA | (SEQ | ISSSLAW | VLYSPNN | GTASV |
| | SYDMSW | VPSSSLGTQTYICN | 30) | PGKGLEWV | ID NO: | YQQKPGK | KNYLAWY | VCLLN |
| | VRQAPG | VNHKPSNTKVDKKV | | SYISGSGG | 22) | APKLLIY | QQKPGQP | NFYPR |
| | KGLEWV | EPKSCDKTHTCPPC | | YTNYADSV | | AASSLQS | PKLLIYW | EAKVQ |
| | SGITIS | PAPEAAGAPSVELE | | KGRFTISR | | GVPSRFS | ASTRESG | WKVDN |
| | GGSTYY | PPKPKDTLMISRTP | | DNSKNTLY | | GSGSGTD | VPDRFSG | ALQSG |
| | ADSVKG | EVTCVVVDVSHEDP | | LQMNSLRA | | FTLTISS | SGSGTDF | NSQES |
| | RFTISR | EVKFNWYVDGVEVH | | EDTAVYYC | | LQPEDFA | TLTISSL | VTEQD |
| | DNSKNT | NAKTKPREEQYNST | | ARDRPYYY | | TYYCQQY | QAEDVAV | SKDST |
| | LYLQMN | YRVVSVLTVLHQDW | | DMDVWGKG | | KSYPVTF | YYCQQYY | YSLSS |
| | SLRAED | LNGKEYKCKVSNKA | | TTVTVSS | | GQGTKVE | TTPPTWG | TLTLS |
| | TAVYYC | LPAPIEKTISKAKG | | (SEQ ID | | IK (SEQ | QGTRLEI | KADYE |
| | ARGRGG | QPREPQVYTLPPSR | | NO: | | ID NO: | K (SEQ | KHKVY |
| | SGWLDY | EEMTKNQVSLTCLV | | 1445) | | 1367) | ID NO: | ACEVT |
| | WGQGTT | KGFYPSDIAVEWES | | | | | 1562) | HQGLS |
| | VTVSS | NGQPENNYKTTPPV | | | | | | SPVTK |
| | (SEQ | LDSDGSFFLYSKLT | | | | | | SFNRG |
| | ID NO: | VDKSRWQQGNVFSC | | | | | | EC |
| | 1476) | SVMHEALHNHYTQK | | | | | | (SEQ |
| | | SLSLSPG (SEQ | | | | | | ID |
| | | ID NO: 44) | | | | | | NO: |
| | | | | | | | | 45) |
| PMAB85 | EVQLLE | ASTKGPSVFPLAPS | GGGGSG | EVQLLESG | GGGGSG | DIQMTQS | DIVMTQS | RTVAA |
| | SGGGLV | SKSTSGGTAALGCL | GGGSGG | GGLVQPGG | GGGSGG | PSSLSAS | PDSLAVS | PSVFI |
| | QPGGSL | VKDYFPEPVTVSWN | GGS | SLRLSCAA | GGSGGG | VGDRVTI | LGERATI | FPPSD |
| | RLSCAA | SGALTSGVHTFPAV | (SEQ | SGFTFSSY | GS | TCRASQS | NCKSSQS | EQLKS |
| | SGFTFS | LQSSGLYSLSSVVT | ID NO: | WMHWVRQA | (SEQ | ISSSLAW | VLYSPHN | GTASV |
| | SYDMSW | VPSSSLGTQTYICN | 30) | PGKGLEWV | ID NO: | YQQKPGK | KNYLAWY | VCLLN |
| | VRQAPG | VNHKPSNTKVDKKV | | SYISGSGG | 22) | APKLLIY | QQKPGQP | NFYPR |
| | KGLEWV | EPKSCDKTHTCPPC | | YTNYADSV | | AASSLQS | PKLLIYW | EAKVQ |
| | SGITIS | PAPEAAGAPSVELE | | KGRFTISR | | GVPSRFS | ASTRESG | WKVDN |
| | GGSTYY | PPKPKDTLMISRTP | | DNSKNTLY | | GSGSGTD | VPDRFSG | ALQSG |
| | ADSVKG | EVTCVVVDVSHEDP | | LQMNSLRA | | FTLTISS | SGSGTDF | NSQES |
| | RFTISR | EVKFNWYVDGVEVH | | EDTAVYYC | | LQPEDFA | TLTISSL | VTEQD |
| | DNSKNT | NAKTKPREEQYNST | | ARDRPYYY | | TYYCQQY | QAEDVAV | SKDST |
| | LYLQMN | YRVVSVLTVLHQDW | | DMDVWGKG | | KSYPVTF | YYCQQYY | YSLSS |
| | SLRAED | LNGKEYKCKVSNKA | | TTVTVSS | | GQGTKVE | TTPPTFG | TLTLS |
| | TAVYYC | LPAPIEKTISKAKG | | (SEQ ID | | IK (SEQ | QGTRLEI | KADYE |
| | ARGRGG | QPREPQVYTLPPSR | | NO: | | ID NO: | K (SEQ | KHKVY |
| | SGWLDY | EEMTKNQVSLTCLV | | 1445) | | 1367) | ID NO: | ACEVT |
| | WGQGTT | KGFYPSDIAVEWES | | | | | 1563) | HQGLS |
| | VTVSS | NGQPENNYKTTPPV | | | | | | SPVTK |
| | (SEQ | LDSDGSFFLYSKLT | | | | | | SFNRG |
| | ID NO: | VDKSRWQQGNVFSC | | | | | | EC |
| | 1476) | SVMHEALHNHYTQK | | | | | | (SEQ |
| | | SLSLSPG (SEQ | | | | | | ID |
| | | ID NO: 44) | | | | | | NO: |
| | | | | | | | | 45) |
| PMAB86 | EVQLLE | ASTKGPSVFPLAPS | GGGGSG | EVQLLESG | GGGGSG | DIQMTQS | DIVMTQS | RTVAA |
| | SGGGLV | SKSTSGGTAALGCL | GGGSGG | GGLVQPGG | GGGSGG | PSSLSAS | PDSLAVS | PSVFI |
| | QPGGSL | VKDYFPEPVTVSWN | GGS | SLRLSCAA | GGSGGG | VGDRVTI | LGERATI | FPPSD |
| | RLSCAA | SGALTSGVHTFPAV | (SEQ | SGFTFSSY | GS | TCRASQS | NCKSSYS | EQLKS |
| | SGFTFS | LQSSGLYSLSSVVT | ID NO: | WMHWVRQA | (SEQ | ISSSLAW | VLYSPNN | GTASV |
| | SYDMSW | VPSSSLGTQTYICN | 30) | PGKGLEWV | ID NO: | YQQKPGK | KNYLAWY | VCLLN |
| | VRQAPG | VNHKPSNTKVDKKV | | SYISGSGG | 22) | APKLLIY | QQKPGQP | NFYPR |
| | KGLEWV | EPKSCDKTHTCPPC | | YTNYADSV | | AASSLQS | PKLLIYW | EAKVQ |
| | SGITIS | PAPEAAGAPSVELE | | KGRFTISR | | GVPSRFS | ASTRESG | WKVDN |
| | GGSTYY | PPKPKDTLMISRTP | | DNSKNTLY | | GSGSGTD | VPDRFSG | ALQSG |
| | ADSVKG | EVTCVVVDVSHEDP | | LQMNSLRA | | FTLTISS | SGSGTDF | NSQES |
| | RFTISR | EVKFNWYVDGVEVH | | EDTAVYYC | | LQPEDFA | TLTISSL | VTEQD |
| | DNSKNT | NAKTKPREEQYNST | | ARDRPYYY | | TYYCQQY | QAEDVAV | SKDST |
| | LYLQMN | YRVVSVLTVLHQDW | | DMDVWGKG | | KSYPVTF | YYCQQYY | YSLSS |
| | SLRAED | LNGKEYKCKVSNKA | | TTVTVSS | | GQGTKVE | TTPPTFG | TLTLS |
| | TAVYYC | LPAPIEKTISKAKG | | (SEQ ID | | IK (SEQ | QGTRLEI | KADYE |
| | ARGRGG | QPREPQVYTLPPSR | | NO: | | ID NO: | K (SEQ | KHKVY |
| | SGWLDY | EEMTKNQVSLTCLV | | 1445) | | 1367) | ID NO: | ACEVT |
| | WGQGTT | KGFYPSDIAVEWES | | | | | 1564) | HQGLS |
| | VTVSS | NGQPENNYKTTPPV | | | | | | SPVTK |
| | (SEQ | LDSDGSFFLYSKLT | | | | | | SFNRG |
| | ID NO: | VDKSRWQQGNVFSC | | | | | | EC |
| | 1476) | SVMHEALHNHYTQK | | | | | | (SEQ |
| | | SLSLSPG (SEQ | | | | | | ID |
| | | ID NO: 44) | | | | | | NO: |
| | | | | | | | | 45) |
| PMAB87 | EVQLLE | ASTKGPSVFPLAPS | GGGGSG | EVQLLESG | GGGGSG | DIQMTQS | DIVMTQS | RTVAA |
| | SGGGLV | SKSTSGGTAALGCL | GGGSGG | GGLVQPGG | GGGSGG | PSSLSAS | PDSLAVS | PSVFI |
| | QPGGSL | VKDYFPEPVTVSWN | GGS | SLRLSCAA | GGSGGG | VGDRVTI | LGERATI | FPPSD |
| | RLSCAA | SGALTSGVHTFPAV | (SEQ | SGFTFSSY | GS | TCRASQS | NCKSSQS | EQLKS |
| | SGFTFS | LQSSGLYSLSSVVT | ID NO: | WMHWVRQA | (SEQ | ISSSLAW | VLYSPNN | GTASV |
| | SYDMSW | VPSSSLGTQTYICN | 30) | PGKGLEWV | ID NO: | YQQKPGK | KNYLAWY | VCLLN |
| | VRQAPG | VNHKPSNTKVDKKV | | SYISGSGG | 22) | APKLLIY | QQKPGQP | NFYPR |
| | KGLEWV | EPKSCDKTHTCPPC | | YTNYADSV | | AASSLQS | PKLLIYW | EAKVQ |
| | SGITIS | PAPEAAGAPSVELE | | KGRFTISR | | GVPSRFS | ASTRESG | WKVDN |
| | GGSTYY | PPKPKDTLMISRTP | | DNSKNTLY | | GSGSGTD | VPDRFSG | ALQSG |
| | ADSVKG | EVTCVVVDVSHEDP | | LQMNSLRA | | FTLTISS | SGSGTDF | NSQES |
| | RFTISR | EVKFNWYVDGVEVH | | EDTAVYYC | | LQPEDFA | TLTISSL | VTEQD |
| | DNSKNT | NAKTKPREEQYNST | | ARDRPYYY | | TYYCQQY | QAEDVAV | SKDST |
| | LYLQMN | YRVVSVLTVLHQDW | | DMDVWGKG | | KSYPVTF | YYCQQYY | YSLSS |
| | SLRAED | LNGKEYKCKVSNKA | | TTVTVSS | | GQGTKVE | LTPPTFG | TLTLS |
| | TAVYYC | LPAPIEKTISKAKG | | (SEQ ID | | IK (SEQ | QGTRLEI | KADYE |
| | ARGRGG | QPREPQVYTLPPSR | | NO: | | ID NO: | K (SEQ | KHKVY |
| | SGWLDY | EEMTKNQVSLTCLV | | 1445) | | 1367) | ID NO: | ACEVT |
| | WGQGTT | KGFYPSDIAVEWES | | | | | 1565) | HQGLS |
| | VTVSS | NGQPENNYKTTPPV | | | | | | SPVTK |
| | (SEQ | LDSDGSFFLYSKLT | | | | | | SFNRG |
| | ID NO: | VDKSRWQQGNVFSC | | | | | | EC |
| | 1476) | SVMHEALHNHYTQK | | | | | | (SEQ |
| | | SLSLSPG (SEQ | | | | | | ID |
| | | ID NO: 44) | | | | | | NO: |
| | | | | | | | | 45) |
| PMAB88 | EVQLLE | ASTKGPSVFPLAPS | GGGGSG | EVQLLESG | GGGGSG | DIQMTQS | DIVMTQS | RTVAA |
| | SGGGLV | SKSTSGGTAALGCL | GGGSGG | GGLVQPGG | GGGSGG | PSSLSAS | PDSLAVS | PSVFI |
| | QPGGSL | VKDYFPEPVTVSWN | GGS | SLRLSCAA | GGSGGG | VGDRVTI | LGERATI | FPPSD |
| | RLSCAA | SGALTSGVHTFPAV | (SEQ | SGFTFSSY | GS | TCRASQS | NCKSSQS | EQLKS |
| | SGFTFS | LQSSGLYSLSSVVT | ID NO: | WMHWVRQA | (SEQ | ISSSLAW | VLYSPNN | GTASV |
| | SYDMSW | VPSSSLGTQTYICN | 30) | PGKGLEWV | ID NO: | YQQKPGK | KNYLAWY | VCLLN |
| | VRQAPG | VNHKPSNTKVDKKV | | SYISGSGG | 22) | APKLLIY | QQKPGQP | NFYPR |
| | KGLEWV | EPKSCDKTHTCPPC | | YTNYADSV | | AASSLQS | PKLLIYW | EAKVQ |
| | SGITIS | PAPEAAGAPSVELE | | KGRFTISR | | GVPSRFS | ASTRESG | WKVDN |
| | GGSTYY | PPKPKDTLMISRTP | | DNSKNTLY | | GSGSGTD | VPDRFSG | ALQSG |
| | ADSVKG | EVTCVVVDVSHEDP | | LQMNSLRA | | FTLTISS | SGSGTDF | NSQES |
| | RFTISR | EVKFNWYVDGVEVH | | EDTAVYYC | | LQPEDFA | TLTISSL | VTEQD |
| | DNSKNT | NAKTKPREEQYNST | | ARDRPYYY | | TYYCQQY | QAEDVAV | SKDST |
| | LYLQMN | YRVVSVLTVLHQDW | | DMDVWGKG | | KSYPVTF | YYCQQYY | YSLSS |
| | SLRAED | LNGKEYKCKVSNKA | | TTVTVSS | | GQGTKVE | TQPPTFG | TLTLS |
| | TAVYYC | LPAPIEKTISKAKG | | (SEQ ID | | IK (SEQ | QGTRLEI | KADYE |
| | ARGRGG | QPREPQVYTLPPSR | | NO: | | ID NO: | K (SEQ | KHKVY |
| | SGWLDY | EEMTKNQVSLTCLV | | 1445) | | 1367) | ID NO: | ACEVT |
| | WGQGTT | KGFYPSDIAVEWES | | | | | 1566) | HQGLS |
| | VTVSS | NGQPENNYKTTPPV | | | | | | SPVTK |
| | (SEQ | LDSDGSFFLYSKLT | | | | | | SFNRG |
| | ID NO: | VDKSRWQQGNVFSC | | | | | | EC |
| | 1476) | SVMHEALHNHYTQK | | | | | | (SEQ |
| | | SLSLSPG (SEQ | | | | | | ID |
| | | ID NO: 44) | | | | | | NO: |
| | | | | | | | | 45) |
| PMAB89 | EVQLLE | ASTKGPSVFPLAPS | GGGGSG | EVQLLESG | GGGGSG | DIQMTQS | DIVMTQS | RTVAA |
| | SGGGLV | SKSTSGGTAALGCL | GGGSGG | GGLVQPGG | GGGSGG | PSSLSAS | PDSLAVS | PSVFI |
| | QPGGSL | VKDYFPEPVTVSWN | GGS | SLRLSCAA | GGSGGG | VGDRVTI | LGERATI | FPPSD |
| | RLSCAA | SGALTSGVHTFPAV | (SEQ | SGFTFSSY | GS | TCRASQS | NCKSSQS | EQLKS |
| | SGFTFS | LQSSGLYSLSSVVT | ID NO: | WMHWVRQA | (SEQ | ISSSLAW | VLYSPNN | GTASV |
| | SYDMSW | VPSSSLGTQTYICN | 30) | PGKGLEWV | ID NO: | YQQKPGK | KNYLAWY | VCLLN |
| | VRQAPG | VNHKPSNTKVDKKV | | SYISGSGG | 22) | APKLLIY | QQKPGQP | NFYPR |
| | KGLEWV | EPKSCDKTHTCPPC | | YTNYADSV | | AASSLQS | PKLLIYW | EAKVQ |
| | SGITIS | PAPEAAGAPSVELE | | KGRFTISR | | GVPSRFS | ASTRFSG | WKVDN |
| | GGSTYY | PPKPKDTLMISRTP | | DNSKNTLY | | GSGSGTD | VPDRFSG | ALQSG |
| | ADSVKG | EVTCVVVDVSHEDP | | LQMNSLRA | | FTLTISS | SGSGTDF | NSQES |
| | RFTISR | EVKFNWYVDGVEVH | | EDTAVYYC | | LQPEDFA | TLTISSL | VTEQD |
| | DNSKNT | NAKTKPREEQYNST | | ARDRPYYY | | TYYCQQY | QAEDVAV | SKDST |
| | LYLQMN | YRVVSVLTVLHQDW | | DMDVWGKG | | KSYPVTF | YYCQQYY | YSLSS |
| | SLRAED | LNGKEYKCKVSNKA | | TTVTVSS | | GQGTKVE | TTPPTWG | TLTLS |
| | TAVYYC | LPAPIEKTISKAKG | | (SEQ ID | | IK (SEQ | QGTRLEI | KADYE |
| | ARGRGG | QPREPQVYTLPPSR | | NO: | | ID NO: | K (SEQ | KHKVY |
| | SGWFDY | EEMTKNQVSLTCLV | | 1445) | | 1367) | ID NO: | ACEVT |
| | WGQGTT | KGFYPSDIAVEWES | | | | | 1567) | HQGLS |
| | VTVSS | NGQPENNYKTTPPV | | | | | | SPVTK |
| | (SEQ | LDSDGSFFLYSKLT | | | | | | SFNRG |
| | ID NO: | VDKSRWQQGNVFSC | | | | | | EC |
| | 1554) | SVMHEALHNHYTQK | | | | | | (SEQ |
| | | SLSLSPG (SEQ | | | | | | ID |
| | | ID NO: 44) | | | | | | NO: |
| | | | | | | | | 45) |
| PMAB90 | EVQLLE | ASTKGPSVFPLAPS | GGGGSG | EVQLLESG | GGGGSG | DIQMTQS | DIVMTQS | RTVAA |
| | SGGGLV | SKSTSGGTAALGCL | GGGSGG | GGLVQPGG | GGGSGG | PSSLSAS | PDSLAVS | PSVFI |
| | QPGGSL | VKDYFPEPVTVSWN | GGS | SLRLSCAA | GGSGGG | VGDRVTI | LGERATI | FPPSD |
| | RLSCAA | SGALTSGVHTFPAV | (SEQ | SGFTFSSY | GS | TCRASQS | NCKSSQS | EQLKS |
| | SGFTFS | LQSSGLYSLSSVVT | ID NO: | WMHWVRQA | (SEQ | ISSSLAW | VLYSPNN | GTASV |
| | SYKMSW | VPSSSLGTQTYICN | 30) | PGKGLEWV | ID NO: | YQQKPGK | KNYLAWY | VCLLN |
| | VRQAPG | VNHKPSNTKVDKKV | | SYISGSGG | 22) | APKLLIY | QQKPGQP | NFYPR |
| | KGLEWV | EPKSCDKTHTCPPC | | YTNYADSV | | AASSLQS | PKLLIYW | EAKVQ |
| | SGITIS | PAPEAAGAPSVELE | | KGRFTISR | | GVPSRFS | ASTRESG | WKVDN |
| | GGATYY | PPKPKDTLMISRTP | | DNSKNTLY | | GSGSGTD | VPDRFSG | ALQSG |
| | ADSVKG | EVTCVVVDVSHEDP | | LQMNSLRA | | FTLTISS | SGSGTDF | NSQES |
| | RFTISR | EVKFNWYVDGVEVH | | EDTAVYYC | | LQPEDFA | TLTISSL | VTEQD |
| | DNSKNT | NAKTKPREEQYNST | | ARDRPYYY | | TYYCQQY | QAEDVAV | SKDST |
| | LYLQMN | YRVVSVLTVLHQDW | | DMDVWGKG | | KSYPVTF | YYCQQYY | YSLSS |
| | SLRAED | LNGKEYKCKVSNKA | | TTVTVSS | | GQGTKVE | TTPPTFG | TLTLS |
| | TAVYYC | LPAPIEKTISKAKG | | (SEQ ID | | IK (SEQ | QGTRLEI | KADYE |
| | ARGAGG | QPREPQVYTLPPSR | | NO: | | ID NO: | K (SEQ | KHKVY |
| | SGFLDY | EEMTKNQVSLTCLV | | 1445) | | 1367) | ID NO: | ACEVT |
| | WGQGTT | KGFYPSDIAVEWES | | | | | 1359) | HQGLS |
| | VTVSS | NGQPENNYKTTPPV | | | | | | SPVTK |
| | (SEQ | LDSDGSFFLYSKLT | | | | | | SFNRG |
| | ID NO: | VDKSRWQQGNVFSC | | | | | | EC |
| | 1568) | SVMHEALHNHYTQK | | | | | | (SEQ |
| | | SLSLSPG (SEQ | | | | | | ID |
| | | ID NO: 44) | | | | | | NO: |
| | | | | | | | | 45) |
| PMAB91 | EVQLLE | ASTKGPSVFPLAPS | GGGGSG | EVQLLESG | GGGGSG | DIQMTQS | DIVMTQS | RTVAA |
| | SGGGLV | SKSTSGGTAALGCL | GGGSGG | GGLVQPGG | GGGSGG | PSSLSAS | PDSLAVS | PSVFI |
| | QPGGSL | VKDYFPEPVTVSWN | GGS | SLRLSCAA | GGSGGG | VGDRVTI | LGERATI | FPPSD |
| | RLSCAA | SGALTSGVHTFPAV | (SEQ | SGFTFSSY | GS | TCRASQS | NCKSSQS | EQLKS |
| | SGFTFS | LQSSGLYSLSSVVT | ID NO: | WMHWVRQA | (SEQ | ISSSLAW | VLYSPNN | GTASV |
| | SYAMSW | VPSSSLGTQTYICN | 30) | PGKGLEWV | ID NO: | YQQKPGK | KNYLAWY | VCLLN |
| | VRQAPG | VNHKPSNTKVDKKV | | SYISGSGG | 22) | APKLLIY | QQKPGQP | NFYPR |
| | KGLEWV | EPKSCDKTHTCPPC | | YTNYADSV | | AASSLQS | PKLLIYW | EAKVQ |
| | SGITIS | PAPEAAGAPSVELE | | KGRFTISR | | GVPSRFS | ASTRESG | WKVDN |
| | GGSTYY | PPKPKDTLMISRTP | | DNSKNTLY | | GSGSGTD | VPDRFSG | ALQSG |
| | ADSVKG | EVTCVVVDVSHEDP | | LQMNSLRA | | FTLTISS | SGSGTDF | NSQES |
| | RFTISR | EVKFNWYVDGVEVH | | EDTAVYYC | | LQPEDFA | TLTISSL | VTEQD |
| | DNSKNT | NAKTKPREEQYNST | | ARDRPYYY | | TYYCQQY | QAEDVAV | SKDST |
| | LYLQMN | YRVVSVLTVLHQDW | | DMDVWGKG | | KSYPVTF | YYCQQYY | YSLSS |
| | SLRAED | LNGKEYKCKVSNKA | | TTVTVSS | | GQGTKVE | TTPPTFG | TLTLS |
| | TAVYYC | LPAPIEKTISKAKG | | (SEQ ID | | IK (SEQ | QGTRLEI | KADYE |
| | ARGRGG | QPREPQVYTLPPSR | | NO: | | ID NO: | K (SEQ | KHKVY |
| | SGFLDY | EEMTKNQVSLTCLV | | 1445) | | 1367) | ID NO: | ACEVT |
| | WGQGTT | KGFYPSDIAVEWES | | | | | 1359) | HQGLS |
| | VTVSS | NGQPENNYKTTPPV | | | | | | SPVTK |
| | (SEQ | LDSDGSFFLYSKLT | | | | | | SFNRG |
| | ID NO: | VDKSRWQQGNVFSC | | | | | | EC |
| | 1569) | SVMHEALHNHYTQK | | | | | | (SEQ |
| | | SLSLSPG (SEQ | | | | | | ID |
| | | ID NO: 44) | | | | | | NO: |
| | | | | | | | | 45) |
| PMAB92 | EVQLLE | ASTKGPSVFPLAPS | GGGGSG | EVQLLESG | GGGGSG | DIQMTQS | DIVMTQS | RTVAA |
| | SGGGLV | SKSTSGGTAALGCL | GGGSGG | GGLVQPGG | GGGSGG | PSSLSAS | PDSLAVS | PSVFI |
| | QPGGSL | VKDYFPEPVTVSWN | GGS | SLRLSCAA | GGSGGG | VGDRVTI | LGERATI | FPPSD |
| | RLSCAA | SGALTSGVHTFPAV | (SEQ | SGFTFSSY | GS | TCRASQS | NCKSSQS | EQLKS |
| | SGFTFS | LQSSGLYSLSSVVT | ID NO: | WMHWVRQA | (SEQ | ISSSLAW | VLYSPNN | GTASV |
| | SYRMSW | VPSSSLGTQTYICN | 30) | PGKGLEWV | ID NO: | YQQKPGK | KNYLAWY | VCLLN |
| | VRQAPG | VNHKPSNTKVDKKV | | SYISGSGG | 22) | APKLLIY | QQKPGQP | NFYPR |
| | KGLEWV | EPKSCDKTHTCPPC | | YTNYADSV | | AASSLQS | PKLLIYW | EAKVQ |
| | SGITIS | PAPEAAGAPSVELE | | KGRFTISR | | GVPSRFS | ASTRESG | WKVDN |
| | GGSTYY | PPKPKDTLMISRTP | | DNSKNTLY | | GSGSGTD | VPDRFSG | ALQSG |
| | ADSVKG | EVTCVVVDVSHEDP | | LQMNSLRA | | FTLTISS | SGSGTDF | NSQES |
| | RFTISR | EVKFNWYVDGVEVH | | EDTAVYYC | | LQPEDFA | TLTISSL | VTEQD |
| | DNSKNT | NAKTKPREEQYNST | | ARDRPYYY | | TYYCQQY | QAEDVAV | SKDST |
| | LYLQMN | YRVVSVLTVLHQDW | | DMDVWGKG | | KSYPVTF | YYCQQYY | YSLSS |
| | SLRAED | LNGKEYKCKVSNKA | | TTVTVSS | | GQGTKVE | TTPPTFG | TLTLS |
| | TAVYYC | LPAPIEKTISKAKG | | (SEQ ID | | IK (SEQ | QGTRLEI | KADYE |
| | ARGRGG | QPREPQVYTLPPSR | | NO: | | ID NO: | K (SEQ | KHKVY |
| | SGWLDY | EEMTKNQVSLTCLV | | 1445) | | 1367) | ID NO: | ACEVT |
| | WGQGTT | KGFYPSDIAVEWES | | | | | 1359) | HQGLS |
| | VTVSS | NGQPENNYKTTPPV | | | | | | SPVTK |
| | (SEQ | LDSDGSFFLYSKLT | | | | | | SFNRG |
| | ID NO: | VDKSRWQQGNVFSC | | | | | | EC |
| | 1570) | SVMHEALHNHYTQK | | | | | | (SEQ |
| | | SLSLSPG (SEQ | | | | | | ID |
| | | ID NO: 44) | | | | | | NO: |
| | | | | | | | | 45) |
| PMAB93 | EVQLLE | ASTKGPSVFPLAPS | GGGGSG | EVQLLESG | GGGGSG | DIQMTQS | DIVMTQS | RTVAA |
| | SGGGLV | SKSTSGGTAALGCL | GGGSGG | GGLVQPGG | GGGSGG | PSSLSAS | PDSLAVS | PSVFI |
| | QPGGSL | VKDYFPEPVTVSWN | GGS | SLRLSCAA | GGSGGG | VGDRVTI | LGERATI | FPPSD |
| | RLSCAA | SGALTSGVHTFPAV | (SEQ | SGFTFSSY | GS | TCRASQS | NCKSSQS | EQLKS |
| | SGFTFS | LQSSGLYSLSSVVT | ID NO: | WMHWVRQA | (SEQ | ISSSLAW | VLYSPNN | GTASV |
| | SYNMSW | VPSSSLGTQTYICN | 30) | PGKGLEWV | ID NO: | YQQKPGK | KNYLAWY | VCLLN |
| | VRQAPG | VNHKPSNTKVDKKV | | SYISGSGG | 22) | APKLLIY | QQKPGQP | NFYPR |
| | KGLEWV | EPKSCDKTHTCPPC | | YTNYADSV | | AASSLQS | PKLLIYW | EAKVQ |
| | SGITIS | PAPEAAGAPSVELE | | KGRFTISR | | GVPSRFS | ASTRESG | WKVDN |
| | GGSTYY | PPKPKDTLMISRTP | | DNSKNTLY | | GSGSGTD | VPDRFSG | ALQSG |
| | ADSVKG | EVTCVVVDVSHEDP | | LQMNSLRA | | FTLTISS | SGSGTDF | NSQES |
| | RFTISR | EVKFNWYVDGVEVH | | EDTAVYYC | | LQPEDFA | TLTISSL | VTEQD |
| | DNSKNT | NAKTKPREEQYNST | | ARDRPYYY | | TYYCQQY | QAEDVAV | SKDST |
| | LYLQMN | YRVVSVLTVLHQDW | | DMDVWGKG | | KSYPVTF | YYCQQYY | YSLSS |
| | SLRAED | LNGKEYKCKVSNKA | | TTVTVSS | | GQGTKVE | TTPPTFG | TLTLS |
| | TAVYYC | LPAPIEKTISKAKG | | (SEQ ID | | IK (SEQ | QGTRLEI | KADYE |
| | ARGRGG | QPREPQVYTLPPSR | | NO: | | ID NO: | K (SEQ | KHKVY |
| | SGWLDY | EEMTKNQVSLTCLV | | 1445) | | 1367) | ID NO: | ACEVT |
| | WGQGTT | KGFYPSDIAVEWES | | | | | 1359) | HQGLS |
| | VTVSS | NGQPENNYKTTPPV | | | | | | SPVTK |
| | (SEQ | LDSDGSFFLYSKLT | | | | | | SFNRG |
| | ID NO: | VDKSRWQQGNVFSC | | | | | | EC |
| | 1571) | SVMHEALHNHYTQK | | | | | | (SEQ |
| | | SLSLSPG (SEQ | | | | | | ID |
| | | ID NO: 44) | | | | | | NO: |
| | | | | | | | | 45) |
| PMAB94 | EVQLLE | ASTKGPSVFPLAPS | GGGGSG | EVQLLESG | GGGGSG | DIQMTQS | DIVMTQS | RTVAA |
| | SGGGLV | SKSTSGGTAALGCL | GGGSGG | GGLVQPGG | GGGSGG | PSSLSAS | PDSLAVS | PSVFI |
| | QPGGSL | VKDYFPEPVTVSWN | GGS | SLRLSCAA | GGSGGG | VGDRVTI | LGERATI | FPPSD |
| | RLSCAA | SGALTSGVHTFPAV | (SEQ | SGFTFSSY | GS | TCRASQS | NCKSSQS | EQLKS |
| | SGFTFS | LQSSGLYSLSSVVT | ID NO: | WMHWVRQA | (SEQ | ISSSLAW | VLYSPNN | GTASV |
| | SYQMSW | VPSSSLGTQTYICN | 30) | PGKGLEWV | ID NO: | YQQKPGK | KNYLAWY | VCLLN |
| | VRQAPG | VNHKPSNTKVDKKV | | SYISGSGG | 22) | APKLLIY | QQKPGQP | NFYPR |
| | KGLEWV | EPKSCDKTHTCPPC | | YTNYADSV | | AASSLQS | PKLLIYW | EAKVQ |
| | SGITIS | PAPEAAGAPSVELE | | KGRFTISR | | GVPSRFS | ASTRESG | WKVDN |
| | GGSTYY | PPKPKDTLMISRTP | | DNSKNTLY | | GSGSGTD | VPDRFSG | ALQSG |
| | ADSVKG | EVTCVVVDVSHEDP | | LQMNSLRA | | FTLTISS | SGSGTDF | NSQES |
| | RFTISR | EVKFNWYVDGVEVH | | EDTAVYYC | | LQPEDFA | TLTISSL | VTEQD |
| | DNSKNT | NAKTKPREEQYNST | | ARDRPYYY | | TYYCQQY | QAEDVAV | SKDST |
| | LYLQMN | YRVVSVLTVLHQDW | | DMDVWGKG | | KSYPVTF | YYCQQYY | YSLSS |
| | SLRAED | LNGKEYKCKVSNKA | | TTVTVSS | | GQGTKVE | TTPPTFG | TLTLS |
| | TAVYYC | LPAPIEKTISKAKG | | (SEQ ID | | IK (SEQ | QGTRLEI | KADYE |
| | ARGRGG | QPREPQVYTLPPSR | | NO: | | ID NO: | K (SEQ | KHKVY |
| | SGWLDY | EEMTKNQVSLTCLV | | 1445) | | 1367) | ID NO: | ACEVT |
| | WGQGTT | KGFYPSDIAVEWES | | | | | 1359) | HQGLS |
| | VTVSS | NGQPENNYKTTPPV | | | | | | SPVTK |
| | (SEQ | LDSDGSFFLYSKLT | | | | | | SFNRG |
| | ID NO: | VDKSRWQQGNVFSC | | | | | | EC |
| | 1572) | SVMHEALHNHYTQK | | | | | | (SEQ |
| | | SLSLSPG (SEQ | | | | | | ID |
| | | ID NO: 44) | | | | | | NO: |
| | | | | | | | | 45) |
| PMAB95 | EVQLLE | ASTKGPSVFPLAPS | GGGGSG | EVQLLESG | GGGGSG | DIQMTQS | DIVMTQS | RTVAA |
| | SGGGLV | SKSTSGGTAALGCL | GGGSGG | GGLVQPGG | GGGSGG | PSSLSAS | PDSLAVS | PSVFI |
| | QPGGSL | VKDYFPEPVTVSWN | GGS | SLRLSCAA | GGSGGG | VGDRVTI | LGERATI | FPPSD |
| | RLSCAA | SGALTSGVHTFPAV | (SEQ | SGFTFSSY | GS | TCRASQS | NCKSSQS | EQLKS |
| | SGFTFS | LQSSGLYSLSSVVT | ID NO: | WMHWVRQA | (SEQ | ISSSLAW | VLYSPNN | GTASV |
| | SYRMSW | VPSSSLGTQTYICN | 30) | PGKGLEWV | ID NO: | YQQKPGK | KNYLAWY | VCLLN |
| | VRQAPG | VNHKPSNTKVDKKV | | SYISGSGG | 22) | APKLLIY | QQKPGQP | NFYPR |
| | KGLEWV | EPKSCDKTHTCPPC | | YTNYADSV | | AASSLQS | PKLLIYW | EAKVQ |
| | SGITIS | PAPEAAGAPSVELE | | KGRFTISR | | GVPSRFS | ASTRESG | WKVDN |
| | GGSTYY | PPKPKDTLMISRTP | | DNSKNTLY | | GSGSGTD | VPDRFSG | ALQSG |
| | ADSVKG | EVTCVVVDVSHEDP | | LQMNSLRA | | FTLTISS | SGSGTDF | NSQES |
| | RFTISR | EVKFNWYVDGVEVH | | EDTAVYYC | | LQPEDFA | TLTISSL | VTEQD |
| | DNSKNT | NAKTKPREEQYNST | | ARDRPYYY | | TYYCQQY | QAEDVAV | SKDST |
| | LYLQMN | YRVVSVLTVLHQDW | | DMDVWGKG | | KSYPVTF | YYCQQYY | YSLSS |
| | SLRAED | LNGKEYKCKVSNKA | | TTVTVSS | | GQGTKVE | TTPPTFG | TLTLS |
| | TAVYYC | LPAPIEKTISKAKG | | (SEQ ID | | IK (SEQ | QGTRLEI | KADYE |
| | ARGRGG | QPREPQVYTLPPSR | | NO: | | ID NO: | K (SEQ | KHKVY |
| | SGWLDY | EEMTKNQVSLTCLV | | 1445) | | 1367) | ID NO: | ACEVT |
| | WGQGTT | KGFYPSDIAVEWES | | | | | 1359) | HQGLS |
| | VTVSS | NGQPENNYKTTPPV | | | | | | SPVTK |
| | (SEQ | LDSDGSFFLYSKLT | | | | | | SFNRG |
| | ID NO: | VDKSRWQQGNVFSC | | | | | | EC |
| | 1570) | SVMHEALHNHYTQK | | | | | | (SEQ |
| | | SLSLSPG (SEQ | | | | | | ID |
| | | ID NO: 44) | | | | | | NO: |
| | | | | | | | | 45) |
| PMAB96 | EVQLLE | ASTKGPSVFPLAPS | GGGGSG | EVQLLESG | GGGGSG | DIQMTQS | DIVMTQS | RTVAA |
| | SGGGLV | SKSTSGGTAALGCL | GGGSGG | GGLVQPGG | GGGSGG | PSSLSAS | PDSLAVS | PSVFI |
| | QPGGSL | VKDYFPEPVTVSWN | GGS | SLRLSCAA | GGSGGG | VGDRVTI | LGERATI | FPPSD |
| | RLSCAA | SGALTSGVHTFPAV | (SEQ | SGFTFSSY | GS | TCRASQS | NCKSSQS | EQLKS |
| | SGFTFS | LQSSGLYSLSSVVT | ID NO: | WMHWVRQA | (SEQ | ISSSLAW | VLYSPNN | GTASV |
| | SYWMSW | VPSSSLGTQTYICN | 30) | PGKGLEWV | ID NO: | YQQKPGK | KNYLAWY | VCLLN |
| | VRQAPG | VNHKPSNTKVDKKV | | SYISGSGG | 22) | APKLLIY | QQKPGQP | NFYPR |
| | KGLEWV | EPKSCDKTHTCPPC | | YTNYADSV | | AASSLQS | PKLLIYW | EAKVQ |
| | SGITIS | PAPEAAGAPSVELE | | KGRFTISR | | GVPSRFS | ASTRESG | WKVDN |
| | GGSTYY | PPKPKDTLMISRTP | | DNSKNTLY | | GSGSGTD | VPDRFSG | ALQSG |
| | ADSVKG | EVTCVVVDVSHEDP | | LQMNSLRA | | FTLTISS | SGSGTDF | NSQES |
| | RFTISR | EVKFNWYVDGVEVH | | EDTAVYYC | | LQPEDFA | TLTISSL | VTEQD |
| | DNSKNT | NAKTKPREEQYNST | | ARDRPYYY | | TYYCQQY | QAEDVAV | SKDST |
| | LYLQMN | YRVVSVLTVLHQDW | | DMDVWGKG | | KSYPVTF | YYCQQYY | YSLSS |
| | SLRAED | LNGKEYKCKVSNKA | | TTVTVSS | | GQGTKVE | TTPPTFG | TLTLS |
| | TAVYYC | LPAPIEKTISKAKG | | (SEQ ID | | IK (SEQ | QGTRLEI | KADYE |
| | ARGRGG | QPREPQVYTLPPSR | | NO: | | ID NO: | K (SEQ | KHKVY |
| | SGWLDY | EEMTKNQVSLTCLV | | 1445) | | 1367) | ID NO: | ACEVT |
| | WGQGTT | KGFYPSDIAVEWES | | | | | 1359) | HQGLS |
| | VTVSS | NGQPENNYKTTPPV | | | | | | SPVTK |
| | (SEQ | LDSDGSFFLYSKLT | | | | | | SFNRG |
| | ID NO: | VDKSRWQQGNVFSC | | | | | | EC |
| | 1573) | SVMHEALHNHYTQK | | | | | | (SEQ |
| | | SLSLSPG (SEQ | | | | | | ID |
| | | ID NO: 44) | | | | | | NO: |
| | | | | | | | | 45) |
| PMAB97 | EVQLLE | ASTKGPSVFPLAPS | GGGGSG | EVQLLESG | GGGGSG | DIQMTQS | DIVMTQS | RTVAA |
| | SGGGLV | SKSTSGGTAALGCL | GGGSGG | GGLVQPGG | GGGSGG | PSSLSAS | PDSLAVS | PSVFI |
| | QPGGSL | VKDYFPEPVTVSWN | GGS | SLRLSCAA | GGSGGG | VGDRVTI | LGERATI | FPPSD |
| | RLSCAA | SGALTSGVHTFPAV | (SEQ | SGFTFSSY | GS | TCRASQS | NCKSSQS | EQLKS |
| | SGFTFS | LQSSGLYSLSSVVT | ID NO: | WMHWVRQA | (SEQ | ISSSLAW | VLYSPNN | GTASV |
| | NSAMSW | VPSSSLGTQTYICN | 30) | PGKGLEWV | ID NO: | YQQKPGK | KNYLAWY | VCLLN |
| | VRQAPG | VNHKPSNTKVDKKV | | SYISGSGG | 22) | APKLLIY | QQKPGQP | NFYPR |
| | KGLEWV | EPKSCDKTHTCPPC | | YTNYADSV | | AASSLQS | PKLLIYW | EAKVQ |
| | SGITIS | PAPEAAGAPSVELE | | KGRFTISR | | GVPSRFS | ASTRESG | WKVDN |
| | GGSTYY | PPKPKDTLMISRTP | | DNSKNTLY | | GSGSGTD | VPDRFSG | ALQSG |
| | ADSVKG | EVTCVVVDVSHEDP | | LQMNSLRA | | FTLTISS | SGSGTDF | NSQES |
| | RFTISR | EVKFNWYVDGVEVH | | EDTAVYYC | | LQPEDFA | TLTISSL | VTEQD |
| | DNSKNT | NAKTKPREEQYNST | | ARDRPYYY | | TYYCQQY | QAEDVAV | SKDST |
| | LYLQMN | YRVVSVLTVLHQDW | | DMDVWGKG | | KSYPVTF | YYCQQGY | YSLSS |
| | SLRAED | LNGKEYKCKVSNKA | | TTVTVSS | | GQGTKVE | TTPPTFG | TLTLS |
| | TAVYYC | LPAPIEKTISKAKG | | (SEQ ID | | IK (SEQ | QGTRLEI | KADYE |
| | ARGRGG | QPREPQVYTLPPSR | | NO: | | ID NO: | K (SEQ | KHKVY |
| | SGWLDY | EEMTKNQVSLTCLV | | 1445) | | 1367) | ID NO: | ACEVT |
| | WGQGTL | KGFYPSDIAVEWES | | | | | 1575) | HQGLS |
| | VTVSS | NGQPENNYKTTPPV | | | | | | SPVTK |
| | (SEQ | LDSDGSFFLYSKLT | | | | | | SFNRG |
| | ID NO: | VDKSRWQQGNVFSC | | | | | | EC |
| | 1574) | SVMHEALHNHYTQK | | | | | | (SEQ |
| | | SLSLSPG (SEQ | | | | | | ID |
| | | ID NO: 44) | | | | | | NO: |
| | | | | | | | | 45) |
| PMAB98 | EVQLLE | ASTKGPSVFPLAPS | GGGGSG | EVQLLESG | GGGGSG | DIQMTQS | DIVMTQS | RTVAA |
| | SGGGLV | SKSTSGGTAALGCL | GGGSGG | GGLVQPGG | GGGSGG | PSSLSAS | PDSLAVS | PSVFI |
| | QPGGSL | VKDYFPEPVTVSWN | GGS | SLRLSCAA | GGSGGG | VGDRVTI | LGERATI | FPPSD |
| | RLSCAA | SGALTSGVHTFPAV | (SEQ | SGFTFSSY | GS | TCRASQS | NCKSSQS | EQLKS |
| | SGFTFS | LQSSGLYSLSSVVT | ID NO: | WMHWVRQA | (SEQ | ISSSLAW | VLYSPNN | GTASV |
| | SYAMSW | VPSSSLGTQTYICN | 30) | PGKGLEWV | ID NO: | YQQKPGK | KNYLAWY | VCLLN |
| | VRQAPG | VNHKPSNTKVDKKV | | SYISGSGG | 22) | APKLLIY | QQKPGQP | NFYPR |
| | KGLEWV | EPKSCDKTHTCPPC | | YTNYADSV | | AASSLQS | PKLLIYW | EAKVQ |
| | SGITIS | PAPEAAGAPSVELE | | KGRFTISR | | GVPSRFS | ASTRESG | WKVDN |
| | GGSTYY | PPKPKDTLMISRTP | | DNSKNTLY | | GSGSGTD | VPDRFSG | ALQSG |
| | ADSVKG | EVTCVVVDVSHEDP | | LQMNSLRA | | FTLTISS | SGSGTDF | NSQES |
| | RFTISR | EVKFNWYVDGVEVH | | EDTAVYYC | | LQPEDFA | TLTISSL | VTEQD |
| | DNSKNT | NAKTKPREEQYNST | | ARDRPYYY | | TYYCQQY | QAEDVAV | SKDST |
| | LYLQMN | YRVVSVLTVLHQDW | | DMDVWGKG | | KSYPVTF | YYCQQGY | YSLSS |
| | SLRAED | LNGKEYKCKVSNKA | | TTVTVSS | | GQGTKVE | TTPPTFG | TLTLS |
| | TAVYYC | LPAPIEKTISKAKG | | (SEQ ID | | IK (SEQ | QGTRLEI | KADYE |
| | ARGRGG | QPREPQVYTLPPSR | | NO: | | ID NO: | K (SEQ | KHKVY |
| | SGELDY | EEMTKNQVSLTCLV | | 1445) | | 1367) | ID NO: | ACEVT |
| | WGQGTT | KGFYPSDIAVEWES | | | | | 1575) | HQGLS |
| | VTVSS | NGQPENNYKTTPPV | | | | | | SPVTK |
| | (SEQ | LDSDGSFFLYSKLT | | | | | | SFNRG |
| | ID NO: | VDKSRWQQGNVFSC | | | | | | EC |
| | 1569) | SVMHEALHNHYTQK | | | | | | (SEQ |
| | | SLSLSPG (SEQ | | | | | | ID |
| | | ID NO: 44) | | | | | | NO: |
| | | | | | | | | 45) |
| PMAB99 | EVQLLE | ASTKGPSVFPLAPS | GGGGSG | EVQLLESG | GGGGSG | DIQMTQS | DIVMTQS | RTVAA |
| | SGGGLV | SKSTSGGTAALGCL | GGGSGG | GGLVQPGG | GGGSGG | PSSLSAS | PDSLAVS | PSVFI |
| | QPGGSL | VKDYFPEPVTVSWN | GGS | SLRLSCAA | GGSGGG | VGDRVTI | LGERATI | FPPSD |
| | RLSCAA | SGALTSGVHTFPAV | (SEQ | SGFTFSSY | GS | TCRASQS | NCKSSQS | EQLKS |
| | SGFTFS | LQSSGLYSLSSVVT | ID NO: | WMHWVRQA | (SEQ | ISSSLAW | VLYSPNN | GTASV |
| | SYDMSW | VPSSSLGTQTYICN | 30) | PGKGLEWV | ID NO: | YQQKPGK | KNYLAWY | VCLLN |
| | VRQAPG | VNHKPSNTKVDKKV | | SYISGSGG | 22) | APKLLIY | QQKPGQP | NFYPR |
| | KGLEWV | EPKSCDKTHTCPPC | | YTNYADSV | | AASSLQS | PKLLIYW | EAKVQ |
| | SGITIS | PAPEAAGAPSVELE | | KGRFTISR | | GVPSRFS | ASTRESG | WKVDN |
| | GGSTYY | PPKPKDTLMISRTP | | DNSKNTLY | | GSGSGTD | VPDRFSG | ALQSG |
| | ADSVKG | EVTCVVVDVSHEDP | | LQMNSLRA | | FTLTISS | SGSGTDF | NSQES |
| | RFTISR | EVKFNWYVDGVEVH | | EDTAVYYC | | LQPEDFA | TLTISSL | VTEQD |
| | DNSKNT | NAKTKPREEQYNST | | ARDRPYYY | | TYYCQQY | QAEDVAV | SKDST |
| | LYLQMN | YRVVSVLTVLHQDW | | DMDVWGKG | | KSYPVTF | YYCQQAY | YSLSS |
| | SLRAED | LNGKEYKCKVSNKA | | TTVTVSS | | GQGTKVE | TTPPTFG | TLTLS |
| | TAVYYC | LPAPIEKTISKAKG | | (SEQ ID | | IK (SEQ | QGTRLEI | KADYE |
| | ARGRGG | QPREPQVYTLPPSR | | NO: | | ID NO: | K (SEQ | KHKVY |
| | SGWLDY | EEMTKNQVSLTCLV | | 1445) | | 1367) | ID NO: | ACEVT |
| | WGQGTT | KGFYPSDIAVEWES | | | | | 1576) | HQGLS |
| | VTVSS | NGQPENNYKTTPPV | | | | | | SPVTK |
| | (SEQ | LDSDGSFFLYSKLT | | | | | | SFNRG |
| | ID NO: | VDKSRWQQGNVFSC | | | | | | EC |
| | 1476) | SVMHEALHNHYTQK | | | | | | (SEQ |
| | | SLSLSPG (SEQ | | | | | | ID |
| | | ID NO: 44) | | | | | | NO: |
| | | | | | | | | 45) |
| PMAB100 | EVQLLE | ASTKGPSVFPLAPS | GGGGSG | EVQLLESG | GGGGSG | DIQMTQS | DIVMTQS | RTVAA |
| | SGGGLV | SKSTSGGTAALGCL | GGGSGG | GGLVQPGG | GGGSGG | PSSLSAS | PDSLAVS | PSVFI |
| | QPGGSL | VKDYFPEPVTVSWN | GGS | SLRLSCAA | GGSGGG | VGDRVTI | LGERATI | FPPSD |
| | RLSCAA | SGALTSGVHTFPAV | (SEQ | SGFTFSSY | GS | TCRASQS | NCKSSQS | EQLKS |
| | SGFTFS | LQSSGLYSLSSVVT | ID NO: | WMHWVRQA | (SEQ | ISSSLAW | VLYSPNN | GTASV |
| | SYDMSW | VPSSSLGTQTYICN | 30) | PGKGLEWV | ID NO: | YQQKPGK | KNYLAWY | VCLLN |
| | VRQAPG | VNHKPSNTKVDKKV | | SYISGSGG | 22) | APKLLIY | QQKPGQP | NFYPR |
| | KGLEWV | EPKSCDKTHTCPPC | | YTNYADSV | | AASSLQS | PKLLIYW | EAKVQ |
| | SGITIS | PAPEAAGAPSVELE | | KGRFTISR | | GVPSRFS | ASTRESG | WKVDN |
| | GGSTYY | PPKPKDTLMISRTP | | DNSKNTLY | | GSGSGTD | VPDRFSG | ALQSG |
| | ADSVKG | EVTCVVVDVSHEDP | | LQMNSLRA | | FTLTISS | SGSGTDF | NSQES |
| | RFTISR | EVKFNWYVDGVEVH | | EDTAVYYC | | LQPEDFA | TLTISSL | VTEQD |
| | DNSKNT | NAKTKPREEQYNST | | ARDRPYYY | | TYYCQQY | QAEDVAV | SKDST |
| | LYLQMN | YRVVSVLTVLHQDW | | DMDVWGKG | | KSYPVTF | YYCQQGY | YSLSS |
| | SLRAED | LNGKEYKCKVSNKA | | TTVTVSS | | GQGTKVE | TTPPTFG | TLTLS |
| | TAVYYC | LPAPIEKTISKAKG | | (SEQ ID | | IK (SEQ | QGTRLEI | KADYE |
| | ARGRGG | QPREPQVYTLPPSR | | NO: | | ID NO: | K (SEQ | KHKVY |
| | SGWLDY | EEMTKNQVSLTCLV | | 1445) | | 1367) | ID NO: | ACEVT |
| | WGQGTT | KGFYPSDIAVEWES | | | | | 1575) | HQGLS |
| | VTVSS | NGQPENNYKTTPPV | | | | | | SPVTK |
| | (SEQ | LDSDGSFFLYSKLT | | | | | | SFNRG |
| | ID NO: | VDKSRWQQGNVFSC | | | | | | EC |
| | 1476) | SVMHEALHNHYTQK | | | | | | (SEQ |
| | | SLSLSPG (SEQ | | | | | | ID |
| | | ID NO: 44) | | | | | | NO: |
| | | | | | | | | 45) |
| PMAB101 | EVQLLE | ASTKGPSVFPLAPS | GGGGSG | EVQLLESG | GGGGSG | DIQMTQS | DIVMTQS | RTVAA |
| | SGGGLV | SKSTSGGTAALGCL | GGGSGG | GGLVQPGG | GGGSGG | PSSLSAS | PDSLAVS | PSVFI |
| | QPGGSL | VKDYFPEPVTVSWN | GGS | SLRLSCAA | GGSGGG | VGDRVTI | LGERATI | FPPSD |
| | RLSCAA | SGALTSGVHTFPAV | (SEQ | SGFTFSSY | GS | TCRASQS | NCKSSQS | EQLKS |
| | SGFTFS | LQSSGLYSLSSVVT | ID NO: | WMHWVRQA | (SEQ | ISSSLAW | VLYSPNN | GTASV |
| | SYDMSW | VPSSSLGTQTYICN | 30) | PGKGLEWV | ID NO: | YQQKPGK | KNYLAWY | VCLLN |
| | VRQAPG | VNHKPSNTKVDKKV | | SYISGSGG | 22) | APKLLIY | QQKPGQP | NFYPR |
| | KGLEWV | EPKSCDKTHTCPPC | | YTNYADSV | | AASSLQS | PKLLIYW | EAKVQ |
| | SGITIS | PAPEAAGAPSVELE | | KGRFTISR | | GVPSRFS | ASTRESG | WKVDN |
| | GGSTYY | PPKPKDTLMISRTP | | DNSKNTLY | | GSGSGTD | VPDRFSG | ALQSG |
| | ADSVKG | EVTCVVVDVSHEDP | | LQMNSLRA | | FTLTISS | SGSGTDF | NSQES |
| | RFTISR | EVKFNWYVDGVEVH | | EDTAVYYC | | LQPEDFA | TLTISSL | VTEQD |
| | DNSKNT | NAKTKPREEQYNST | | ARDRPYYY | | TYYCQQY | QAEDVAV | SKDST |
| | LYLQMN | YRVVSVLTVLHQDW | | DMDVWGKG | | KSYPVTF | YYCQQMY | YSLSS |
| | SLRAED | LNGKEYKCKVSNKA | | TTVTVSS | | GQGTKVE | TTPPTFG | TLTLS |
| | TAVYYC | LPAPIEKTISKAKG | | (SEQ ID | | IK (SEQ | QGTRLEI | KADYE |
| | ARGRGG | QPREPQVYTLPPSR | | NO: | | ID NO: | K (SEQ | KHKVY |
| | SGWLDY | EEMTKNQVSLTCLV | | 1445) | | 1367) | ID NO: | ACEVT |
| | WGQGTT | KGFYPSDIAVEWES | | | | | 1577) | HQGLS |
| | VTVSS | NGQPENNYKTTPPV | | | | | | SPVTK |
| | (SEQ | LDSDGSFFLYSKLT | | | | | | SFNRG |
| | ID NO: | VDKSRWQQGNVFSC | | | | | | EC |
| | 1476) | SVMHEALHNHYTQK | | | | | | (SEQ |
| | | SLSLSPG (SEQ | | | | | | ID |
| | | ID NO: 44) | | | | | | NO: |
| | | | | | | | | 45) |
| PMAB102 | EVQLLE | ASTKGPSVFPLAPS | GGGGSG | EVQLLESG | GGGGSG | DIQMTQS | DIVMTQS | RTVAA |
| | SGGGLV | SKSTSGGTAALGCL | GGGSGG | GGLVQPGG | GGGSGG | PSSLSAS | PDSLAVS | PSVFI |
| | QPGGSL | VKDYFPEPVTVSWN | GGS | SLRLSCAA | GGSGGG | VGDRVTI | LGERATI | FPPSD |
| | RLSCAA | SGALTSGVHTFPAV | (SEQ | SGFTFSSY | GS | TCRASQS | NCKSSQS | EQLKS |
| | SGFTFS | LQSSGLYSLSSVVT | ID NO: | WMHWVRQA | (SEQ | ISSSLAW | VLYSPNN | GTASV |
| | SYDMSW | VPSSSLGTQTYICN | 30) | PGKGLEWV | ID NO: | YQQKPGK | KNYLAWY | VCLLN |
| | VRQAPG | VNHKPSNTKVDKKV | | SYISGSGG | 22) | APKLLIY | QQKPGQP | NFYPR |
| | KGLEWV | EPKSCDKTHTCPPC | | YTNYADSV | | AASSLQS | PKLLIYW | EAKVQ |
| | SGITIS | PAPEAAGAPSVELE | | KGRFTISR | | GVPSRFS | ASTRESG | WKVDN |
| | GGSTYY | PPKPKDTLMISRTP | | DNSKNTLY | | GSGSGTD | VPDRFSG | ALQSG |
| | ADSVKG | EVTCVVVDVSHEDP | | LQMNSLRA | | FTLTISS | SGSGTDF | NSQES |
| | RFTISR | EVKFNWYVDGVEVH | | EDTAVYYC | | LQPEDFA | TLTISSL | VTEQD |
| | DNSKNT | NAKTKPREEQYNST | | ARDRPYYY | | TYYCQQY | QAEDVAV | SKDST |
| | LYLQMN | YRVVSVLTVLHQDW | | DMDVWGKG | | KSYPVTF | YYCQQTY | YSLSS |
| | SLRAED | LNGKEYKCKVSNKA | | TTVTVSS | | GQGTKVE | TTPPTFG | TLTLS |
| | TAVYYC | LPAPIEKTISKAKG | | (SEQ ID | | IK (SEQ | QGTRLEI | KADYE |
| | ARGRGG | QPREPQVYTLPPSR | | NO: | | ID NO: | K (SEQ | KHKVY |
| | SGWLDY | EEMTKNQVSLTCLV | | 1445) | | 1367) | ID NO: | ACEVT |
| | WGQGTT | KGFYPSDIAVEWES | | | | | 1578) | HQGLS |
| | VTVSS | NGQPENNYKTTPPV | | | | | | SPVTK |
| | (SEQ | LDSDGSFFLYSKLT | | | | | | SFNRG |
| | ID NO: | VDKSRWQQGNVFSC | | | | | | EC |
| | 1476) | SVMHEALHNHYTQK | | | | | | (SEQ |
| | | SLSLSPG (SEQ | | | | | | ID |
| | | ID NO: 44) | | | | | | NO: |
| | | | | | | | | 45) |
| PMAB103 | EVQLLE | ASTKGPSVFPLAPS | GGGGSG | EVQLLESG | GGGGSG | DIQMTQS | DIVMTQS | RTVAA |
| | SGGGLV | SKSTSGGTAALGCL | GGGSGG | GGLVQPGG | GGGSGG | PSSLSAS | PDSLAVS | PSVFI |
| | QPGGSL | VKDYFPEPVTVSWN | GGS | SLRLSCAA | GGSGGG | VGDRVTI | LGERATI | FPPSD |
| | RLSCAA | SGALTSGVHTFPAV | (SEQ | SGFTFSSY | GS | TCRASQS | NCKSSQS | EQLKS |
| | SGFTFS | LQSSGLYSLSSVVT | ID NO: | WMHWVRQA | (SEQ | ISSSLAW | VLYSPNN | GTASV |
| | SYDMSW | VPSSSLGTQTYICN | 30) | PGKGLEWV | ID NO: | YQQKPGK | KNYLAWY | VCLLN |
| | VRQAPG | VNHKPSNTKVDKKV | | SYISGSGG | 22) | APKLLIY | QQKPGQP | NFYPR |
| | KGLEWV | EPKSCDKTHTCPPC | | YTNYADSV | | AASSLQS | PKLLIYW | EAKVQ |
| | SGITIS | PAPEAAGAPSVELE | | KGRFTISR | | GVPSRFS | ASTRESG | WKVDN |
| | GGSTYY | PPKPKDTLMISRTP | | DNSKNTLY | | GSGSGTD | VPDRFSG | ALQSG |
| | ADSVKG | EVTCVVVDVSHEDP | | LQMNSLRA | | FTLTISS | SGSGTDF | NSQES |
| | RFTISR | EVKFNWYVDGVEVH | | EDTAVYYC | | LQPEDFA | TLTISSL | VTEQD |
| | DNSKNT | NAKTKPREEQYNST | | ARDRPYYY | | TYYCQQY | QAEDVAV | SKDST |
| | LYLQMN | YRVVSVLTVLHQDW | | DMDVWGKG | | KSYPVTF | YYCQQVY | YSLSS |
| | SLRAED | LNGKEYKCKVSNKA | | TTVTVSS | | GQGTKVE | TTPPTFG | TLTLS |
| | TAVYYC | LPAPIEKTISKAKG | | (SEQ ID | | IK (SEQ | QGTRLEI | KADYE |
| | ARGRGG | QPREPQVYTLPPSR | | NO: | | ID NO: | K (SEQ | KHKVY |
| | SGWLDY | EEMTKNQVSLTCLV | | 1445) | | 1367) | ID NO: | ACEVT |
| | WGQGTT | KGFYPSDIAVEWES | | | | | 1579) | HQGLS |
| | VTVSS | NGQPENNYKTTPPV | | | | | | SPVTK |
| | (SEQ | LDSDGSFFLYSKLT | | | | | | SFNRG |
| | ID NO: | VDKSRWQQGNVFSC | | | | | | EC |
| | 1476) | SVMHEALHNHYTQK | | | | | | (SEQ |
| | | SLSLSPG (SEQ | | | | | | ID |
| | | ID NO: 44) | | | | | | NO: |
| | | | | | | | | 45) |
| PMAB104 | EVQLLE | ASTKGPSVFPLAPS | GGGGSG | EVQLLESG | GGGGSG | DIQMTQS | DIVMTQS | RTVAA |
| | SGGGLV | SKSTSGGTAALGCL | GGGSGG | GGLVQPGG | GGGSGG | PSSLSAS | PDSLAVS | PSVFI |
| | QPGGSL | VKDYFPEPVTVSWN | GGS | SLRLSCAA | GGSGGG | VGDRVTI | LGERATI | FPPSD |
| | RLSCAA | SGALTSGVHTFPAV | (SEQ | SGFTFSSY | GS | TCRASQS | NCKSSQS | EQLKS |
| | SGFTFS | LQSSGLYSLSSVVT | ID NO: | WMHWVRQA | (SEQ | ISSSLAW | VLYSPNN | GTASV |
| | SYAMSW | VPSSSLGTQTYICN | 30) | PGKGLEWV | ID NO: | YQQKPGK | KNYLAWY | VCLLN |
| | VRQAPG | VNHKPSNTKVDKKV | | SYISGSGG | 22) | APKLLIY | QQKPGQP | NFYPR |
| | KGLEWV | EPKSCDKTHTCPPC | | YTNYADSV | | AASSLQS | PKLLIYW | EAKVQ |
| | SGITIQ | PAPEAAGAPSVELE | | KGRFTISR | | GVPSRFS | ASTRESG | WKVDN |
| | GGSTYY | PPKPKDTLMISRTP | | DNSKNTLY | | GSGSGTD | VPDRFSG | ALQSG |
| | ADSVKG | EVTCVVVDVSHEDP | | LQMNSLRA | | FTLTISS | SGSGTDF | NSQES |
| | RFTISR | EVKFNWYVDGVEVH | | EDTAVYYC | | LQPEDFA | TLTISSL | VTEQD |
| | DNSKNT | NAKTKPREEQYNST | | ARDRPYYY | | TYYCQQY | QAEDVAV | SKDST |
| | LYLQMN | YRVVSVLTVLHQDW | | DMDVWGKG | | KSYPVTF | YYCQQGY | YSLSS |
| | SLRAED | LNGKEYKCKVSNKA | | TTVTVSS | | GQGTKVE | TTPPTFG | TLTLS |
| | TAVYYC | LPAPIEKTISKAKG | | (SEQ ID | | IK (SEQ | QGTRLEI | KADYE |
| | ARGRGG | QPREPQVYTLPPSR | | NO: | | ID NO: | K (SEQ | KHKVY |
| | SGWLDY | EEMTKNQVSLTCLV | | 1445) | | 1367) | ID NO: | ACEVT |
| | WGQGTT | KGFYPSDIAVEWES | | | | | 1575) | HQGLS |
| | VTVSS | NGQPENNYKTTPPV | | | | | | SPVTK |
| | (SEQ | LDSDGSFFLYSKLT | | | | | | SFNRG |
| | ID NO: | VDKSRWQQGNVFSC | | | | | | EC |
| | 1580) | SVMHEALHNHYTQK | | | | | | (SEQ |
| | | SLSLSPG (SEQ | | | | | | ID |
| | | ID NO: 44) | | | | | | NO: |
| | | | | | | | | 45) |
| PMAB105 | EVQLLE | ASTKGPSVFPLAPS | GGGGSG | EVQLLESG | GGGGSG | DIQMTQS | DIVMTQS | RTVAA |
| | SGGGLV | SKSTSGGTAALGCL | GGGSGG | GGLVQPGG | GGGSGG | PSSLSAS | PDSLAVS | PSVFI |
| | QPGGSL | VKDYFPEPVTVSWN | GGS | SLRLSCAA | GGSGGG | VGDRVTI | LGERATI | FPPSD |
| | RLSCAA | SGALTSGVHTFPAV | (SEQ | SGFTFSSY | GS | TCRASQS | NCKSSQS | EQLKS |
| | SGFTFS | LQSSGLYSLSSVVT | ID NO: | WMHWVRQA | (SEQ | ISSSLAW | VLYSPNN | GTASV |
| | SYAMSW | VPSSSLGTQTYICN | 30) | PGKGLEWV | ID NO: | YQQKPGK | KNYLAWY | VCLLN |
| | VRQAPG | VNHKPSNTKVDKKV | | SYISGSGG | 22) | APKLLIY | QQKPGQP | NFYPR |
| | KGLEWV | EPKSCDKTHTCPPC | | YTNYADSV | | AASSLQS | PKLLIYW | EAKVQ |
| | SGITIS | PAPEAAGAPSVELE | | KGRFTISR | | GVPSRFS | ASTRESG | WKVDN |
| | GGSTYY | PPKPKDTLMISRTP | | DNSKNTLY | | GSGSGTD | VPDRFSG | ALQSG |
| | ADSVKG | EVTCVVVDVSHEDP | | LQMNSLRA | | FTLTISS | SGSGTDF | NSQES |
| | RFTISR | EVKFNWYVDGVEVH | | EDTAVYYC | | LQPEDFA | TLTISSL | VTEQD |
| | DNSKNT | NAKTKPREEQYNST | | ARDRPYYY | | TYYCQQY | QAEDVAV | SKDST |
| | LYLQMN | YRVVSVLTVLHQDW | | DMDVWGKG | | KSYPVTF | YYCQQYY | YSLSS |
| | SLRAED | LNGKEYKCKVSNKA | | TTVTVSS | | GQGTKVE | TGPPTFG | TLTLS |
| | TAVYYC | LPAPIEKTISKAKG | | (SEQ ID | | IK (SEQ | QGTRLEI | KADYE |
| | ARGRGG | QPREPQVYTLPPSR | | NO: | | ID NO: | K (SEQ | KHKVY |
| | AGWLDY | EEMTKNQVSLTCLV | | 1445) | | 1367) | ID NO: | ACEVT |
| | WGQGTT | KGFYPSDIAVEWES | | | | | 1582) | HQGLS |
| | VTVSS | NGQPENNYKTTPPV | | | | | | SPVTK |
| | (SEQ | LDSDGSFFLYSKLT | | | | | | SFNRG |
| | ID NO: | VDKSRWQQGNVFSC | | | | | | EC |
| | 1581) | SVMHEALHNHYTQK | | | | | | (SEQ |
| | | SLSLSPG (SEQ | | | | | | ID |
| | | ID NO: 44) | | | | | | NO: |
| | | | | | | | | 45) |
| PMAB106 | QVQLVQ | ASTKGPSVFPLAPS | GGGGSG | EVQLLESG | GGGGSG | DIQMTQS | DIQMTQS | RTVAA |
| | SGAEVK | SKSTSGGTAALGCL | GGGSGG | GGLVQPGG | GGGSGG | PSSLSAS | PSSLSAS | PSVFI |
| | KPGASV | VKDYFPEPVTVSWN | GGS | SLRLSCAA | GGSGGG | VGDRVTI | VGDRVTI | FPPSD |
| | KVSCKA | SGALTSGVHTFPAV | (SEQ | SGFTFSSY | GS | TCRASQS | TCQASRD | EQLKS |
| | SGYSFT | LQSSGLYSLSSVVT | ID NO: | WMHWVRQA | (SEQ | ISSSLAW | IKNYLAW | GTASV |
| | TYYMHW | VPSSSLGTQTYICN | 30) | PGKGLEWV | ID NO: | YQQKPGK | YQQKPGK | VCLLN |
| | VRQAPG | VNHKPSNTKVDKKV | | SYISGSGG | 22) | APKLLIY | APKLLIY | NFYPR |
| | QGLEWM | EPKSCDKTHTCPPC | | YTNYADSV | | AASSLQS | AASSLQS | EAKVQ |
| | GIINPS | PAPEAAGAPSVELE | | KGRFTISR | | GVPSRFS | GVPSRFS | WKVDN |
| | GGSTSY | PPKPKDTLMISRTP | | DNSKNTLY | | GSGSGTD | GSGSGTD | ALQSG |
| | AQKFQG | EVTCVVVDVSHEDP | | LQMNSLRA | | FTLTISS | FTLTISS | NSQES |
| | RVTMTR | EVKFNWYVDGVEVH | | EDTAVYYC | | LQPEDFA | LQPEDFA | VTEQD |
| | DTSTST | NAKTKPREEQYNST | | ARDRPYYY | | TYYCQQY | TYYCQQS | SKDST |
| | VYMELS | YRVVSVLTVLHQDW | | DMDVWGKG | | KSYPVTF | YSTPPTF | YSLSS |
| | SLRSED | LNGKEYKCKVSNKA | | TTVTVSS | | GQGTKVE | GPGTKVD | TLTLS |
| | TAVYYC | LPAPIEKTISKAKG | | (SEQ ID | | IK (SEQ | IK (SEQ | KADYE |
| | ASGWVY | QPREPQVYTLPPSR | | NO: | | ID NO: | ID NO: | KHKVY |
| | WGQGTL | EEMTKNQVSLTCLV | | 1445) | | 1367) | 1449) | ACEVT |
| | VTVSS | KGFYPSDIAVEWES | | | | | | HQGLS |
| | (SEQ | NGQPENNYKTTPPV | | | | | | SPVTK |
| | ID NO: | LDSDGSFFLYSKLT | | | | | | SFNRG |
| | 1583) | VDKSRWQQGNVFSC | | | | | | EC |
| | | SVMHEALHNHYTQK | | | | | | (SEQ |
| | | SLSLSPG (SEQ | | | | | | ID |
| | | ID NO: 44) | | | | | | NO: |
| | | | | | | | | 45) |
| PMAB107 | QVQLVQ | ASTKGPSVFPLAPS | GGGGSG | EVQLLESG | GGGGSG | DIQMTQS | DIQMTQS | RTVAA |
| | SGAEVK | SKSTSGGTAALGCL | GGGSGG | GGLVQPGG | GGGSGG | PSSLSAS | PSSLSAS | PSVFI |
| | KPGASV | VKDYFPEPVTVSWN | GGS | SLRLSCAA | GGSGGG | VGDRVTI | VGDRVTI | FPPSD |
| | KVSCKA | SGALTSGVHTFPAV | (SEQ | SGFTFSSY | GS | TCRASQS | TCQASRD | EQLKS |
| | SGYSFT | LQSSGLYSLSSVVT | ID NO: | WMHWVRQA | (SEQ | ISSSLAW | IKNYLAW | GTASV |
| | TYYMHW | VPSSSLGTQTYICN | 30) | PGKGLEWV | ID NO: | YQQKPGK | YQQKPGK | VCLLN |
| | VRQAPG | VNHKPSNTKVDKKV | | SYISGSGG | 22) | APKLLIY | APKLLIY | NFYPR |
| | QGLEWM | EPKSCDKTHTCPPC | | YTNYADSV | | AASSLQS | AASSLQS | EAKVQ |
| | GIIQPS | PAPEAAGAPSVELE | | KGRFTISR | | GVPSRFS | GVPSRFS | WKVDN |
| | GGSTSY | PPKPKDTLMISRTP | | DNSKNTLY | | GSGSGTD | GSGSGTD | ALQSG |
| | AQKFQG | EVTCVVVDVSHEDP | | LQMNSLRA | | FTLTISS | FTLTISS | NSQES |
| | RVTMTR | EVKFNWYVDGVEVH | | EDTAVYYC | | LQPEDFA | LQPEDFA | VTEQD |
| | DTSTST | NAKTKPREEQYNST | | ARDRPYYY | | TYYCQQY | TYYCQQS | SKDST |
| | VYMELS | YRVVSVLTVLHQDW | | DMDVWGKG | | KSYPVTF | YSTPPTF | YSLSS |
| | SLRSED | LNGKEYKCKVSNKA | | TTVTVSS | | GQGTKVE | GPGTKVD | TLTLS |
| | TAVYYC | LPAPIEKTISKAKG | | (SEQ ID | | IK (SEQ | IK (SEQ | KADYE |
| | ASGWVY | QPREPQVYTLPPSR | | NO: | | ID NO: | ID NO: | KHKVY |
| | WGQGTL | EEMTKNQVSLTCLV | | 1445) | | 1367) | 1449) | ACEVT |
| | VTVSS | KGFYPSDIAVEWES | | | | | | HQGLS |
| | (SEQ | NGQPENNYKTTPPV | | | | | | SPVTK |
| | ID NO: | LDSDGSFFLYSKLT | | | | | | SFNRG |
| | 1584) | VDKSRWQQGNVFSC | | | | | | EC |
| | | SVMHEALHNHYTQK | | | | | | (SEQ |
| | | SLSLSPG (SEQ | | | | | | ID |
| | | ID NO: 44) | | | | | | NO: |
| | | | | | | | | 45) |
| PMAB108 | QVQLVQ | ASTKGPSVFPLAPS | GGGGSG | EVQLLESG | GGGGSG | DIQMTQS | DIQMTQS | RTVAA |
| | SGAEVK | SKSTSGGTAALGCL | GGGSGG | GGLVQPGG | GGGSGG | PSSLSAS | PSSLSAS | PSVFI |
| | KPGASV | VKDYFPEPVTVSWN | GGS | SLRLSCAA | GGSGGG | VGDRVTI | VGDRVTI | FPPSD |
| | KVSCKA | SGALTSGVHTFPAV | (SEQ | SGFTFSDF | GS | TCRASQS | TCQASRD | EQLKS |
| | SGYTFT | LQSSGLYSLSSVVT | ID NO: | WMHWVRQA | (SEQ | VSRSLAW | IKNYLAW | GTASV |
| | TYYMHW | VPSSSLGTQTYICN | 30) | PGKGLEWI | ID NO: | YQQKPGK | YQQKPGK | VCLLN |
| | VRQAPG | VNHKPSNTKVDKKV | | SYISGDSG | 22) | APKLLIY | APKLLIY | NFYPR |
| | QGLEWM | EPKSCDKTHTCPPC | | YTNYADSV | | AASSLQS | AASSLQS | EAKVQ |
| | GIIAPS | PAPEAAGAPSVELE | | KGRFTISR | | GVPSRFS | GVPSRFS | WKVDN |
| | GGSTSY | PPKPKDTLMISRTP | | DNSKNTLY | | GSGSGTD | GSGSGTD | ALQSG |
| | AQKFQG | EVTCVVVDVSHEDP | | LQMNSLRA | | FTLTISS | FTLTISS | NSQES |
| | RVTMTR | EVKFNWYVDGVEVH | | EDTAVYYC | | LQPEDFA | LQPEDFA | VTEQD |
| | DTSTST | NAKTKPREEQYNST | | ARDRPYYY | | TYYCQQY | TYYCQQS | SKDST |
| | VYMELS | YRVVSVLTVLHQDW | | YMDVWGKG | | KSYPVTF | YSTPPTF | YSLSS |
| | SLRSED | LNGKEYKCKVSNKA | | TTVTVSS | | GQGTKVE | GPGTKVD | TLTLS |
| | TAVYYC | LPAPIEKTISKAKG | | (SEQ ID | | IK (SEQ | IK (SEQ | KADYE |
| | ASGWVY | QPREPQVYTLPPSR | | NO: 591) | | ID NO: | ID NO: | KHKVY |
| | WGQGTL | EEMTKNQVSLTCLV | | | | 592) | 1449) | ACEVT |
| | VTVSS | KGFYPSDIAVEWES | | | | | | HQGLS |
| | (SEQ | NGQPENNYKTTPPV | | | | | | SPVTK |
| | ID NO: | LDSDGSFFLYSKLT | | | | | | SFNRG |
| | 1585) | VDKSRWQQGNVFSC | | | | | | EC |
| | | SVMHEALHNHYTQK | | | | | | (SEQ |
| | | SLSLSPG (SEQ | | | | | | ID |
| | | ID NO: 44) | | | | | | NO: |
| | | | | | | | | 45) |
| PMAB109 | QVQLVQ | ASTKGPSVFPLAPS | GGGGSG | EVQLLESG | GGGGSG | DIQMTQS | DIQMTQS | RTVAA |
| | SGAEVK | SKSTSGGTAALGCL | GGGSGG | GGLVQPGG | GGGSGG | PSSLSAS | PSSLSAS | PSVFI |
| | KPGASV | VKDYFPEPVTVSWN | GGS | SLRLSCAA | GGSGGG | VGDRVTI | VGDRVTI | FPPSD |
| | KVSCKA | SGALTSGVHTFPAV | (SEQ | SGFTFSDF | GS | TCRASQS | TCQASRD | EQLKS |
| | SGYSFT | LQSSGLYSLSSVVT | ID NO: | WMHWVRQA | (SEQ | VSRSLAW | IKNYLAW | GTASV |
| | SYYMHW | VPSSSLGTQTYICN | 30) | PGKGLEWI | ID NO: | YQQKPGK | YQQKPGK | VCLLN |
| | VRQAPG | VNHKPSNTKVDKKV | | SYISGDSG | 22) | APKLLIY | APKLLIY | NFYPR |
| | QGLEWM | EPKSCDKTHTCPPC | | YTNYADSV | | AASSLQS | AASSLQS | EAKVQ |
| | GIIAPS | PAPEAAGAPSVELE | | KGRFTISR | | GVPSRFS | GVPSRFS | WKVDN |
| | GGSTSY | PPKPKDTLMISRTP | | DNSKNTLY | | GSGSGTD | GSGSGTD | ALQSG |
| | AQKFQG | EVTCVVVDVSHEDP | | LQMNSLRA | | FTLTISS | FTLTISS | NSQES |
| | RVTMTR | EVKFNWYVDGVEVH | | EDTAVYYC | | LQPEDFA | LQPEDFA | VTEQD |
| | DTSTST | NAKTKPREEQYNST | | ARDRPYYY | | TYYCQQY | TYYCQQS | SKDST |
| | VYMELS | YRVVSVLTVLHQDW | | YMDVWGKG | | KSYPVTF | YSTPPTF | YSLSS |
| | SLRSED | LNGKEYKCKVSNKA | | TTVTVSS | | GQGTKVE | GPGTKVD | TLTLS |
| | TAVYYC | LPAPIEKTISKAKG | | (SEQ ID | | IK (SEQ | IK (SEQ | KADYE |
| | ASGWVY | QPREPQVYTLPPSR | | NO: 591) | | ID NO: | ID NO: | KHKVY |
| | WGQGTL | EEMTKNQVSLTCLV | | | | 592) | 1449) | ACEVT |
| | VTVSS | KGFYPSDIAVEWES | | | | | | HQGLS |
| | (SEQ | NGQPENNYKTTPPV | | | | | | SPVTK |
| | ID NO: | LDSDGSFFLYSKLT | | | | | | SFNRG |
| | 1586) | VDKSRWQQGNVFSC | | | | | | EC |
| | | SVMHEALHNHYTQK | | | | | | (SEQ |
| | | SLSLSPG (SEQ | | | | | | ID |
| | | ID NO: 44) | | | | | | NO: |
| | | | | | | | | 45) |
| PMAB110 | QVQLVQ | ASTKGPSVFPLAPS | GGGGSG | EVQLLESG | GGGGSG | DIQMTQS | DIQMTQS | RTVAA |
| | SGAEVK | SKSTSGGTAALGCL | GGGSGG | GGLVQPGG | GGGSGG | PSSLSAS | PSSLSAS | PSVFI |
| | KPGASV | VKDYFPEPVTVSWN | GGS | SLRLSCAA | GGSGGG | VGDRVTI | VGDRVTI | FPPSD |
| | KVSCKA | SGALTSGVHTFPAV | (SEQ | SGFTFSDF | GS | TCRASQS | TCQASRD | EQLKS |
| | SGYTFT | LQSSGLYSLSSVVT | ID NO: | WMHWVRQA | (SEQ | VSRSLAW | IKNYLAW | GTASV |
| | SYYMHW | VPSSSLGTQTYICN | 30) | PGKGLEWI | ID NO: | YQQKPGK | YQQKPGK | VCLLN |
| | VRQAPG | VNHKPSNTKVDKKV | | SYISGDSG | 22) | APKLLIY | APKLLIY | NFYPR |
| | QGLEWM | EPKSCDKTHTCPPC | | YTNYADSV | | AASSLQS | AASSLQS | EAKVQ |
| | GIIAPS | PAPEAAGAPSVELE | | KGRFTISR | | GVPSRFS | GVPSRFS | WKVDN |
| | GGSTSY | PPKPKDTLMISRTP | | DNSKNTLY | | GSGSGTD | GSGSGTD | ALQSG |
| | AQKFQG | EVTCVVVDVSHEDP | | LQMNSLRA | | FTLTISS | FTLTISS | NSQES |
| | RVTMTR | EVKFNWYVDGVEVH | | EDTAVYYC | | LQPEDFA | LQPEDFA | VTEQD |
| | DTSTST | NAKTKPREEQYNST | | ARDRPYYY | | TYYCQQY | TYYCQQS | SKDST |
| | VYMELS | YRVVSVLTVLHQDW | | YMDVWGKG | | KSYPVTF | YSTPPTF | YSLSS |
| | SLRSED | LNGKEYKCKVSNKA | | TTVTVSS | | GQGTKVE | GPGTKVD | TLTLS |
| | TAVYYC | LPAPIEKTISKAKG | | (SEQ ID | | IK (SEQ | IK (SEQ | KADYE |
| | ASGWVY | QPREPQVYTLPPSR | | NO: 591) | | ID NO: | ID NO: | KHKVY |
| | WGQGTL | EEMTKNQVSLTCLV | | | | 592) | 1449) | ACEVT |
| | VTVSS | KGFYPSDIAVEWES | | | | | | HQGLS |
| | (SEQ | NGQPENNYKTTPPV | | | | | | SPVTK |
| | ID NO: | LDSDGSFFLYSKLT | | | | | | SFNRG |
| | 1587) | VDKSRWQQGNVFSC | | | | | | EC |
| | | SVMHEALHNHYTQK | | | | | | (SEQ |
| | | SLSLSPG (SEQ | | | | | | ID |
| | | ID NO: 44) | | | | | | NO: |
| | | | | | | | | 45) |
| PMAB111 | QVQLVQ | ASTKGPSVFPLAPS | GGGGSG | EVQLLESG | GGGGSG | DIQMTQS | DIQMTQS | RTVAA |
| | SGAEVK | SKSTSGGTAALGCL | GGGSGG | GGLVQPGG | GGGSGG | PSSLSAS | PSSLSAS | PSVFI |
| | KPGASV | VKDYFPEPVTVSWN | GGS | SLRLSCAA | GGSGGG | VGDRVTI | VGDRVTI | FPPSD |
| | KVSCKA | SGALTSGVHTFPAV | (SEQ | SGFTFSDF | GS | TCRASQS | TCRASRD | EQLKS |
| | SGYSFT | LQSSGLYSLSSVVT | ID NO: | WMHWVRQA | (SEQ | VSRSLAW | IKNYLAW | GTASV |
| | TYYMHW | VPSSSLGTQTYICN | 30) | PGKGLEWI | ID NO: | YQQKPGK | YQQKPGK | VCLLN |
| | VRQAPG | VNHKPSNTKVDKKV | | SYISGDSG | 22) | APKLLIY | APKLLIY | NFYPR |
| | QGLEWM | EPKSCDKTHTCPPC | | YTNYADSV | | AASSLQS | AASSLQS | EAKVQ |
| | GIIAPS | PAPEAAGAPSVELE | | KGRFTISR | | GVPSRFS | GVPSRFS | WKVDN |
| | GGSTSY | PPKPKDTLMISRTP | | DNSKNTLY | | GSGSGTD | GSGSGTD | ALQSG |
| | AQKFQG | EVTCVVVDVSHEDP | | LQMNSLRA | | FTLTISS | FTLTISS | NSQES |
| | RVTMTR | EVKFNWYVDGVEVH | | EDTAVYYC | | LQPEDFA | LQPEDFA | VTEQD |
| | DTSTST | NAKTKPREEQYNST | | ARDRPYYY | | TYYCQQY | TYYCQQS | SKDST |
| | VYMELS | YRVVSVLTVLHQDW | | YMDVWGKG | | KSYPVTF | YSTPPTF | YSLSS |
| | SLRSED | LNGKEYKCKVSNKA | | TTVTVSS | | GQGTKVE | GPGTKVD | TLTLS |
| | TAVYYC | LPAPIEKTISKAKG | | (SEQ ID | | IK (SEQ | IK (SEQ | KADYE |
| | ASGWVY | QPREPQVYTLPPSR | | NO: 591) | | ID NO: | ID NO: | KHKVY |
| | WGQGTL | EEMTKNQVSLTCLV | | | | 592) | 1589) | ACEVT |
| | VTVSS | KGFYPSDIAVEWES | | | | | | HQGLS |
| | (SEQ | NGQPENNYKTTPPV | | | | | | SPVTK |
| | ID NO: | LDSDGSFFLYSKLT | | | | | | SFNRG |
| | 1588) | VDKSRWQQGNVFSC | | | | | | EC |
| | | SVMHEALHNHYTQK | | | | | | (SEQ |
| | | SLSLSPG (SEQ | | | | | | ID |
| | | ID NO: 44) | | | | | | NO: |
| | | | | | | | | 45) |
| PMAB112 | QVQLVQ | ASTKGPSVFPLAPS | GGGGSG | EVQLLESG | GGGGSG | DIQMTQS | DIQMTQS | RTVAA |
| | SGAEVK | SKSTSGGTAALGCL | GGGSGG | GGLVQPGG | GGGSGG | PSSLSAS | PSSLSAS | PSVFI |
| | KPGASV | VKDYFPEPVTVSWN | GGS | SLRLSCAA | GGSGGG | VGDRVTI | VGDRVTI | FPPSD |
| | KVSCKA | SGALTSGVHTFPAV | (SEQ | SGFTFSDF | GS | TCRASQS | TCQASQD | EQLKS |
| | SGYSFT | LQSSGLYSLSSVVT | ID NO: | WMHWVRQA | (SEQ | VSRSLAW | IKNYLAW | GTASV |
| | TYYMHW | VPSSSLGTQTYICN | 30) | PGKGLEWI | ID NO: | YQQKPGK | YQQKPGK | VCLLN |
| | VRQAPG | VNHKPSNTKVDKKV | | SYISGDSG | 22) | APKLLIY | APKLLIY | NFYPR |
| | QGLEWM | EPKSCDKTHTCPPC | | YTNYADSV | | AASSLQS | AASSLQS | EAKVQ |
| | GIIAPS | PAPEAAGAPSVELE | | KGRFTISR | | GVPSRFS | GVPSRFS | WKVDN |
| | GGSTSY | PPKPKDTLMISRTP | | DNSKNTLY | | GSGSGTD | GSGSGTD | ALQSG |
| | AQKFQG | EVTCVVVDVSHEDP | | LQMNSLRA | | FTLTISS | FTLTISS | NSQES |
| | RVTMTR | EVKFNWYVDGVEVH | | EDTAVYYC | | LQPEDFA | LQPEDFA | VTEQD |
| | DTSTST | NAKTKPREEQYNST | | ARDRPYYY | | TYYCQQY | TYYCQQS | SKDST |
| | VYMELS | YRVVSVLTVLHQDW | | YMDVWGKG | | KSYPVTF | YSTPPTF | YSLSS |
| | SLRSED | LNGKEYKCKVSNKA | | TTVTVSS | | GQGTKVE | GPGTKVD | TLTLS |
| | TAVYYC | LPAPIEKTISKAKG | | (SEQ ID | | IK (SEQ | IK (SEQ | KADYE |
| | ASGWVY | QPREPQVYTLPPSR | | NO: 591) | | ID NO: | ID NO: | KHKVY |
| | WGQGTL | EEMTKNQVSLTCLV | | | | 592) | 1590) | ACEVT |
| | VTVSS | KGFYPSDIAVEWES | | | | | | HQGLS |
| | (SEQ | NGQPENNYKTTPPV | | | | | | SPVTK |
| | ID NO: | LDSDGSFFLYSKLT | | | | | | SFNRG |
| | 1588) | VDKSRWQQGNVFSC | | | | | | EC |
| | | SVMHEALHNHYTQK | | | | | | (SEQ |
| | | SLSLSPG (SEQ | | | | | | ID |
| | | ID NO: 44) | | | | | | NO: |
| | | | | | | | | 45) |
| PMAB113 | QVQLVQ | ASTKGPSVFPLAPS | GGGGSG | EVQLLESG | GGGGSG | DIQMTQS | DIQMTQS | RTVAA |
| | SGAEVK | SKSTSGGTAALGCL | GGGSGG | GGLVQPGG | GGGSGG | PSSLSAS | PSSLSAS | PSVFI |
| | KPGASV | VKDYFPEPVTVSWN | GGS | SLRLSCAA | GGSGGG | VGDRVTI | VGDRVTI | FPPSD |
| | KVSCKA | SGALTSGVHTFPAV | (SEQ | SGFTFSDF | GS | TCRASQS | TCQASRS | EQLKS |
| | SGYSFT | LQSSGLYSLSSVVT | ID NO: | WMHWVRQA | (SEQ | VSRSLAW | IKNYLAW | GTASV |
| | TYYMHW | VPSSSLGTQTYICN | 30) | PGKGLEWI | ID NO: | YQQKPGK | YQQKPGK | VCLLN |
| | VRQAPG | VNHKPSNTKVDKKV | | SYISGDSG | 22) | APKLLIY | APKLLIY | NFYPR |
| | QGLEWM | EPKSCDKTHTCPPC | | YTNYADSV | | AASSLQS | AASSLQS | EAKVQ |
| | GIIAPS | PAPEAAGAPSVELE | | KGRFTISR | | GVPSRFS | GVPSRFS | WKVDN |
| | GGSTSY | PPKPKDTLMISRTP | | DNSKNTLY | | GSGSGTD | GSGSGTD | ALQSG |
| | AQKFQG | EVTCVVVDVSHEDP | | LQMNSLRA | | FTLTISS | FTLTISS | NSQES |
| | RVTMTR | EVKFNWYVDGVEVH | | EDTAVYYC | | LQPEDFA | LQPEDFA | VTEQD |
| | DTSTST | NAKTKPREEQYNST | | ARDRPYYY | | TYYCQQY | TYYCQQS | SKDST |
| | VYMELS | YRVVSVLTVLHQDW | | YMDVWGKG | | KSYPVTF | YSTPPTF | YSLSS |
| | SLRSED | LNGKEYKCKVSNKA | | TTVTVSS | | GQGTKVE | GPGTKVD | TLTLS |
| | TAVYYC | LPAPIEKTISKAKG | | (SEQ ID | | IK (SEQ | IK (SEQ | KADYE |
| | ASGWVY | QPREPQVYTLPPSR | | NO: 591) | | ID NO: | ID NO: | KHKVY |
| | WGQGTL | EEMTKNQVSLTCLV | | | | 592) | 1591) | ACEVT |
| | VTVSS | KGFYPSDIAVEWES | | | | | | HQGLS |
| | (SEQ | NGQPENNYKTTPPV | | | | | | SPVTK |
| | ID NO: | LDSDGSFFLYSKLT | | | | | | SFNRG |
| | 1588) | VDKSRWQQGNVFSC | | | | | | EC |
| | | SVMHEALHNHYTQK | | | | | | (SEQ |
| | | SLSLSPG (SEQ | | | | | | ID |
| | | ID NO: 44) | | | | | | NO: |
| | | | | | | | | 45) |
| PMAB114 | QVQLVQ | ASTKGPSVFPLAPS | GGGGSG | EVQLLESG | GGGGSG | DIQMTQS | DIQMTQS | RTVAA |
| | SGAEVK | SKSTSGGTAALGCL | GGGSGG | GGLVQPGG | GGGSGG | PSSLSAS | PSSLSAS | PSVFI |
| | KPGASV | VKDYFPEPVTVSWN | GGS | SLRLSCAA | GGSGGG | VGDRVTI | VGDRVTI | FPPSD |
| | KVSCKA | SGALTSGVHTFPAV | (SEQ | SGFTFSDF | GS | TCRASQS | TCQASRD | EQLKS |
| | SGYSFT | LQSSGLYSLSSVVT | ID NO: | WMHWVRQA | (SEQ | VSRSLAW | ISNYLAW | GTASV |
| | TYYMHW | VPSSSLGTQTYICN | 30) | PGKGLEWI | ID NO: | YQQKPGK | YQQKPGK | VCLLN |
| | VRQAPG | VNHKPSNTKVDKKV | | SYISGDSG | 22) | APKLLIY | APKLLIY | NFYPR |
| | QGLEWM | EPKSCDKTHTCPPC | | YTNYADSV | | AASSLQS | AASSLQS | EAKVQ |
| | GIIAPS | PAPEAAGAPSVELE | | KGRFTISR | | GVPSRFS | GVPSRFS | WKVDN |
| | GGSTSY | PPKPKDTLMISRTP | | DNSKNTLY | | GSGSGTD | GSGSGTD | ALQSG |
| | AQKFQG | EVTCVVVDVSHEDP | | LQMNSLRA | | FTLTISS | FTLTISS | NSQES |
| | RVTMTR | EVKFNWYVDGVEVH | | EDTAVYYC | | LQPEDFA | LQPEDFA | VTEQD |
| | DTSTST | NAKTKPREEQYNST | | ARDRPYYY | | TYYCQQY | TYYCQQS | SKDST |
| | VYMELS | YRVVSVLTVLHQDW | | YMDVWGKG | | KSYPVTF | YSTPPTF | YSLSS |
| | SLRSED | LNGKEYKCKVSNKA | | TTVTVSS | | GQGTKVE | GPGTKVD | TLTLS |
| | TAVYYC | LPAPIEKTISKAKG | | (SEQ ID | | IK (SEQ | IK (SEQ | KADYE |
| | ASGWVY | QPREPQVYTLPPSR | | NO: 591) | | ID NO: | ID NO: | KHKVY |
| | WGQGTL | EEMTKNQVSLTCLV | | | | 592) | 1592) | ACEVT |
| | VTVSS | KGFYPSDIAVEWES | | | | | | HQGLS |
| | (SEQ | NGQPENNYKTTPPV | | | | | | SPVTK |
| | ID NO: | LDSDGSFFLYSKLT | | | | | | SFNRG |
| | 1588) | VDKSRWQQGNVFSC | | | | | | EC |
| | | SVMHEALHNHYTQK | | | | | | (SEQ |
| | | SLSLSPG (SEQ | | | | | | ID |
| | | ID NO: 44) | | | | | | NO: |
| | | | | | | | | 45) |
| PMAB115 | QVQLVQ | ASTKGPSVFPLAPS | GGGGSG | EVQLLESG | GGGGSG | DIQMTQS | DIQMTQS | RTVAA |
| | SGAEVK | SKSTSGGTAALGCL | GGGSGG | GGLVQPGG | GGGSGG | PSSLSAS | PSSLSAS | PSVFI |
| | KPGASV | VKDYFPEPVTVSWN | GGS | SLRLSCAA | GGSGGG | VGDRVTI | VGDRVTI | FPPSD |
| | KVSCKA | SGALTSGVHTFPAV | (SEQ | SGFTFSDF | GS | TCRASQS | TCQASRD | EQLKS |
| | SGYSFT | LQSSGLYSLSSVVT | ID NO: | WMHWVRQA | (SEQ | VSRSLAW | IKSYLAW | GTASV |
| | TYYMHW | VPSSSLGTQTYICN | 30) | PGKGLEWI | ID NO: | YQQKPGK | YQQKPGK | VCLLN |
| | VRQAPG | VNHKPSNTKVDKKV | | SYISGDSG | 22) | APKLLIY | APKLLIY | NFYPR |
| | QGLEWM | EPKSCDKTHTCPPC | | YTNYADSV | | AASSLQS | AASSLQS | EAKVQ |
| | GIIAPS | PAPEAAGAPSVELE | | KGRFTISR | | GVPSRFS | GVPSRFS | WKVDN |
| | GGSTSY | PPKPKDTLMISRTP | | DNSKNTLY | | GSGSGTD | GSGSGTD | ALQSG |
| | AQKFQG | EVTCVVVDVSHEDP | | LQMNSLRA | | FTLTISS | FTLTISS | NSQES |
| | RVTMTR | EVKFNWYVDGVEVH | | EDTAVYYC | | LQPEDFA | LQPEDFA | VTEQD |
| | DTSTST | NAKTKPREEQYNST | | ARDRPYYY | | TYYCQQY | TYYCQQS | SKDST |
| | VYMELS | YRVVSVLTVLHQDW | | YMDVWGKG | | KSYPVTF | YSTPPTF | YSLSS |
| | SLRSED | LNGKEYKCKVSNKA | | TTVTVSS | | GQGTKVE | GPGTKVD | TLTLS |
| | TAVYYC | LPAPIEKTISKAKG | | (SEQ ID | | IK (SEQ | IK (SEQ | KADYE |
| | ASGWVY | QPREPQVYTLPPSR | | NO: 591) | | ID NO: | ID NO: | KHKVY |
| | WGQGTL | EEMTKNQVSLTCLV | | | | 592) | 1593) | ACEVT |
| | VTVSS | KGFYPSDIAVEWES | | | | | | HQGLS |
| | (SEQ | NGQPENNYKTTPPV | | | | | | SPVTK |
| | ID NO: | LDSDGSFFLYSKLT | | | | | | SFNRG |
| | 1588) | VDKSRWQQGNVFSC | | | | | | EC |
| | | SVMHEALHNHYTQK | | | | | | (SEQ |
| | | SLSLSPG (SEQ | | | | | | ID |
| | | ID NO: 44) | | | | | | NO: |
| | | | | | | | | 45) |
| PMAB116 | QVQLVQ | ASTKGPSVFPLAPS | GGGGSG | EVQLLESG | GGGGSG | DIQMTQS | DIQMTQS | RTVAA |
| | SGAEVK | SKSTSGGTAALGCL | GGGSGG | GGLVQPGG | GGGSGG | PSSLSAS | PSSLSAS | PSVFI |
| | KPGASV | VKDYFPEPVTVSWN | GGS | SLRLSCAA | GGSGGG | VGDRVTI | VGDRVTI | FPPSD |
| | KVSCKA | SGALTSGVHTFPAV | (SEQ | SGFTFSDF | GS | TCRASQS | TCQASRD | EQLKS |
| | SGYSFT | LQSSGLYSLSSVVT | ID NO: | WMHWVRQA | (SEQ | VSRSLAW | IKNYLNW | GTASV |
| | TYYMHW | VPSSSLGTQTYICN | 30) | PGKGLEWI | ID NO: | YQQKPGK | YQQKPGK | VCLLN |
| | VRQAPG | VNHKPSNTKVDKKV | | SYISGDSG | 22) | APKLLIY | APKLLIY | NFYPR |
| | QGLEWM | EPKSCDKTHTCPPC | | YTNYADSV | | AASSLQS | AASSLQS | EAKVQ |
| | GIIAPS | PAPEAAGAPSVELE | | KGRFTISR | | GVPSRFS | GVPSRFS | WKVDN |
| | GGSTSY | PPKPKDTLMISRTP | | DNSKNTLY | | GSGSGTD | GSGSGTD | ALQSG |
| | AQKFQG | EVTCVVVDVSHEDP | | LQMNSLRA | | FTLTISS | FTLTISS | NSQES |
| | RVTMTR | EVKFNWYVDGVEVH | | EDTAVYYC | | LQPEDFA | LQPEDFA | VTEQD |
| | DTSTST | NAKTKPREEQYNST | | ARDRPYYY | | TYYCQQY | TYYCQQS | SKDST |
| | VYMELS | YRVVSVLTVLHQDW | | YMDVWGKG | | KSYPVTF | YSTPPTF | YSLSS |
| | SLRSED | LNGKEYKCKVSNKA | | TTVTVSS | | GQGTKVE | GPGTKVD | TLTLS |
| | TAVYYC | LPAPIEKTISKAKG | | (SEQ ID | | IK (SEQ | IK (SEQ | KADYE |
| | ASGWVY | QPREPQVYTLPPSR | | NO: 591) | | ID NO: | ID NO: | KHKVY |
| | WGQGTL | EEMTKNQVSLTCLV | | | | 592) | 1594) | ACEVT |
| | VTVSS | KGFYPSDIAVEWES | | | | | | HQGLS |
| | (SEQ | NGQPENNYKTTPPV | | | | | | SPVTK |
| | ID NO: | LDSDGSFFLYSKLT | | | | | | SFNRG |
| | 1588) | VDKSRWQQGNVFSC | | | | | | EC |
| | | SVMHEALHNHYTQK | | | | | | (SEQ |
| | | SLSLSPG (SEQ | | | | | | ID |
| | | ID NO: 44) | | | | | | NO: |
| | | | | | | | | 45) |
| PMAB117 | QVQLVQ | ASTKGPSVFPLAPS | GGGGSG | EVQLLESG | GGGGSG | DIQMTQS | DIQMTQS | RTVAA |
| | SGAEVK | SKSTSGGTAALGCL | GGGSGG | GGLVQPGG | GGGSGG | PSSLSAS | PSSLSAS | PSVFI |
| | KPGASV | VKDYFPEPVTVSWN | GGS | SLRLSCAA | GGSGGG | VGDRVTI | VGDRVTI | FPPSD |
| | KVSCKA | SGALTSGVHTFPAV | (SEQ | SGFTFSDF | GS | TCRASQS | TCQASRD | EQLKS |
| | SGYSFT | LQSSGLYSLSSVVT | ID NO: | WMHWVRQA | (SEQ | VSRSLAW | IKNYLAW | GTASV |
| | TYYMHW | VPSSSLGTQTYICN | 30) | PGKGLEWI | ID NO: | YQQKPGK | YQQKPGK | VCLLN |
| | VRQAPG | VNHKPSNTKVDKKV | | SYISGDSG | 22) | APKLLIY | APKLLIY | NFYPR |
| | QGLEWM | EPKSCDKTHTCPPC | | YTNYADSV | | AASSLQS | AASSLQS | EAKVQ |
| | GIIAPS | PAPEAAGAPSVELE | | KGRFTISR | | GVPSRFS | GVPSRFS | WKVDN |
| | GGSTSY | PPKPKDTLMISRTP | | DNSKNTLY | | GSGSGTD | GSGSGTD | ALQSG |
| | AQKFQG | EVTCVVVDVSHEDP | | LQMNSLRA | | FTLTISS | FTLTISS | NSQES |
| | RVTMTR | EVKFNWYVDGVEVH | | EDTAVYYC | | LQPEDFA | LQPEDFA | VTEQD |
| | DTSTST | NAKTKPREEQYNST | | ARDRPYYY | | TYYCQQY | TYYCQQS | SKDST |
| | VYMELS | YRVVSVLTVLHQDW | | YMDVWGKG | | KSYPVTF | YSTPRTF | YSLSS |
| | SLRSED | LNGKEYKCKVSNKA | | TTVTVSS | | GQGTKVE | GPGTKVD | TLTLS |
| | TAVYYC | LPAPIEKTISKAKG | | (SEQ ID | | IK (SEQ | IK (SEQ | KADYE |
| | ASGWVY | QPREPQVYTLPPSR | | NO: 591) | | ID NO: | ID NO: | KHKVY |
| | WGQGTL | EEMTKNQVSLTCLV | | | | 592) | 1595) | ACEVT |
| | VTVSS | KGFYPSDIAVEWES | | | | | | HQGLS |
| | (SEQ | NGQPENNYKTTPPV | | | | | | SPVTK |
| | ID NO: | LDSDGSFFLYSKLT | | | | | | SFNRG |
| | 1588) | VDKSRWQQGNVFSC | | | | | | EC |
| | | SVMHEALHNHYTQK | | | | | | (SEQ |
| | | SLSLSPG (SEQ | | | | | | ID |
| | | ID NO: 44) | | | | | | NO: |
| | | | | | | | | 45) |
| PMAB118 | QVQLVQ | ASTKGPSVFPLAPS | GGGGSG | EVQLLESG | GGGGSG | DIQMTQS | DIQMTQS | RTVAA |
| | SGAEVK | SKSTSGGTAALGCL | GGGSGG | GGLVQPGG | GGGSGG | PSSLSAS | PSSLSAS | PSVFI |
| | KPGASV | VKDYFPEPVTVSWN | GGS | SLRLSCAA | GGSGGG | VGDRVTI | VGDRVTI | FPPSD |
| | KVSCKA | SGALTSGVHTFPAV | (SEQ | SGFTFSDF | GS | TCRASQS | TCRASQS | EQLKS |
| | SGYSFT | LQSSGLYSLSSVVT | ID NO: | WMHWVRQA | (SEQ | VSRSLAW | ISSYLNW | GTASV |
| | TYYMHW | VPSSSLGTQTYICN | 30) | PGKGLEWI | ID NO: | YQQKPGK | YQQKPGK | VCLLN |
| | VRQAPG | VNHKPSNTKVDKKV | | SYISGDSG | 22) | APKLLIY | APKLLIY | NFYPR |
| | QGLEWM | EPKSCDKTHTCPPC | | YTNYADSV | | AASSLQS | AASSLQS | EAKVQ |
| | GIIAPS | PAPEAAGAPSVELE | | KGRFTISR | | GVPSRFS | GVPSRFS | WKVDN |
| | GGSTSY | PPKPKDTLMISRTP | | DNSKNTLY | | GSGSGTD | GSGSGTD | ALQSG |
| | AQKFQG | EVTCVVVDVSHEDP | | LQMNSLRA | | FTLTISS | FTLTISS | NSQES |
| | RVTMTR | EVKFNWYVDGVEVH | | EDTAVYYC | | LQPEDFA | LQPEDFA | VTEQD |
| | DTSTST | NAKTKPREEQYNST | | ARDRPYYY | | TYYCQQY | TYYCQQS | SKDST |
| | VYMELS | YRVVSVLTVLHQDW | | YMDVWGKG | | KSYPVTF | YSTPRTF | YSLSS |
| | SLRSED | LNGKEYKCKVSNKA | | TTVTVSS | | GQGTKVE | GPGTKVD | TLTLS |
| | TAVYYC | LPAPIEKTISKAKG | | (SEQ ID | | IK (SEQ | IK (SEQ | KADYE |
| | ASGWVY | QPREPQVYTLPPSR | | NO: 591) | | ID NO: | ID NO: | KHKVY |
| | WGQGTL | EEMTKNQVSLTCLV | | | | 592) | 1596) | ACEVT |
| | VTVSS | KGFYPSDIAVEWES | | | | | | HQGLS |
| | (SEQ | NGQPENNYKTTPPV | | | | | | SPVTK |
| | ID NO: | LDSDGSFFLYSKLT | | | | | | SFNRG |
| | 1588) | VDKSRWQQGNVFSC | | | | | | EC |
| | | SVMHEALHNHYTQK | | | | | | (SEQ |
| | | SLSLSPG (SEQ | | | | | | ID |
| | | ID NO: 44) | | | | | | NO: |
| | | | | | | | | 45) |
| PMAB119 | QVQLVQ | ASTKGPSVFPLAPS | GGGGSG | EVQLLESG | GGGGSG | DIQMTQS | DIQMTQS | RTVAA |
| | SGAEVK | SKSTSGGTAALGCL | GGGSGG | GGLVQPGG | GGGSGG | PSSLSAS | PSSLSAS | PSVFI |
| | KPGASV | VKDYFPEPVTVSWN | GGS | SLRLSCAA | GGSGGG | VGDRVTI | VGDRVTI | FPPSD |
| | KVSCKA | SGALTSGVHTFPAV | (SEQ | SGFTFSDF | GS | TCRASQS | TCQASRD | EQLKS |
| | SGYSFT | LQSSGLYSLSSVVT | ID NO: | WMHWVRQA | (SEQ | VSRSLAW | IKNYLAW | GTASV |
| | TYYMHW | VPSSSLGTQTYICN | 30) | PGKGLEWI | ID NO: | YQQKPGK | YQQKPGK | VCLLN |
| | VRQAPG | VNHKPSNTKVDKKV | | SYISGDSG | 22) | APKLLIY | APKLLIY | NFYPR |
| | QGLEWM | EPKSCDKTHTCPPC | | YTNYADSV | | AASSLQS | AASSLQS | EAKVQ |
| | GIIAPS | PAPEAAGAPSVELE | | KGRFTISR | | GVPSRFS | GVPSRFS | WKVDN |
| | GGSTSY | PPKPKDTLMISRTP | | DNSKNTLY | | GSGSGTD | GSGSGTD | ALQSG |
| | AQKFQG | EVTCVVVDVSHEDP | | LQMNSLRA | | FTLTISS | FTLTISS | NSQES |
| | RVTMTR | EVKFNWYVDGVEVH | | EDTAVYYC | | LQPEDFA | LQPEDFA | VTEQD |
| | DTSTST | NAKTKPREEQYNST | | ARDRPYYY | | TYYCQQY | TYYCQQS | SKDST |
| | VYMELS | YRVVSVLTVLHQDW | | YMDVWGKG | | KSYPVTF | YSTPPTF | YSLSS |
| | SLRSED | LNGKEYKCKVSNKA | | TTVTVSS | | GQGTKVE | GPGTKVD | TLTLS |
| | TAVYYC | LPAPIEKTISKAKG | | (SEQ ID | | IK (SEQ | IK (SEQ | KADYE |
| | ASGWVY | QPREPQVYTLPPSR | | NO: 591) | | ID NO: | ID NO: | KHKVY |
| | WGQGTL | EEMTKNQVSLTCLV | | | | 592) | 1449) | ACEVT |
| | VTVSS | KGFYPSDIAVEWES | | | | | | HQGLS |
| | (SEQ | NGQPENNYKTTPPV | | | | | | SPVTK |
| | ID NO: | LDSDGSFFLYSKLT | | | | | | SFNRG |
| | 1588) | VDKSRWQQGNVFSC | | | | | | EC |
| | | SVMHEALHNHYTQK | | | | | | (SEQ |
| | | SLSLSPG (SEQ | | | | | | ID |
| | | ID NO: 44) | | | | | | NO: |
| | | | | | | | | 45) |
| PMAB120 | EVQLVQ | ASTKGPSVFPLAPS | GGGGSG | EVQLLESG | GGGGSG | DIQMTQS | DIQMTQS | RTVAA |
| | SGAEVK | SKSTSGGTAALGCL | GGGSGG | GGLVQPGG | GGGSGG | PSSLSAS | PSSLSAS | PSVFI |
| | KPGASV | VKDYFPEPVTVSWN | GGS | SLRLSCAA | GGSGGG | VGDRVTI | VGDRVTI | FPPSD |
| | KVSCKA | SGALTSGVHTFPAV | (SEQ | SGFTFSSY | GS | TCRASQS | TCRASQS | EQLKS |
| | SGYSFT | LQSSGLYSLSSVVT | ID NO: | WMHWVRQA | (SEQ | ISSSLAW | ISSYLAW | GTASV |
| | SYYMHW | VPSSSLGTQTYICN | 30) | PGKGLEWV | ID NO: | YQQKPGK | YQQKPGK | VCLLN |
| | VRQAPG | VNHKPSNTKVDKKV | | SYISGSGG | 22) | APKLLIY | APKLLIY | NFYPR |
| | QGLEWM | EPKSCDKTHTCPPC | | YTNYADSV | | AASSLQS | AASSLQS | EAKVQ |
| | GAINPS | PAPEAAGAPSVELE | | KGRFTISR | | GVPSRFS | GVPSRFS | WKVDN |
| | GGSTSY | PPKPKDTLMISRTP | | DNSKNTLY | | GSGSGTD | GSGSGTD | ALQSG |
| | AQKFQG | EVTCVVVDVSHEDP | | LQMNSLRA | | FTLTISS | FTLTISS | NSQES |
| | RVTMTR | EVKFNWYVDGVEVH | | EDTAVYYC | | LQPEDFA | LQPEDFA | VTEQD |
| | DTSTST | NAKTKPREEQYNST | | ARDRPYYY | | TYYCQQY | TYYCQQS | SKDST |
| | VYMELS | YRVVSVLTVLHQDW | | DMDVWGKG | | KSYPVTE | YSTPPTF | YSLSS |
| | SLRSED | LNGKEYKCKVSNKA | | TTVTVSS | | GQGTKVE | GPGTKVD | TLTLS |
| | TAVYYC | LPAPIEKTISKAKG | | (SEQ ID | | IK (SEQ | IK (SEQ | KADYE |
| | ASGWVY | QPREPQVYTLPPSR | | NO: | | ID NO: | ID NO: | KHKVY |
| | WGQGTL | EEMTKNQVSLTCLV | | 1445) | | 1367) | 1479) | ACEVT |
| | VTVSS | KGFYPSDIAVEWES | | | | | | HQGLS |
| | (SEQ | NGQPENNYKTTPPV | | | | | | SPVTK |
| | ID NO: | LDSDGSFFLYSKLT | | | | | | SFNRG |
| | 1597) | VDKSRWQQGNVFSC | | | | | | EC |
| | | SVMHEALHNHYTQK | | | | | | (SEQ |
| | | SLSLSPG (SEQ | | | | | | ID |
| | | ID NO: 44) | | | | | | NO: |
| | | | | | | | | 45) |
| PMAB121 | EVQLVQ | ASTKGPSVFPLAPS | GGGGSG | EVQLLESG | GGGGSG | DIQMTQS | DIQMTQS | RTVAA |
| | SGAEVK | SKSTSGGTAALGCL | GGGSGG | GGLVQPGG | GGGSGG | PSSLSAS | PSSLSAS | PSVFI |
| | KPGASV | VKDYFPEPVTVSWN | GGS | SLRLSCAA | GGSGGG | VGDRVTI | VGDRVTI | FPPSD |
| | KVSCKA | SGALTSGVHTFPAV | (SEQ | SGFTFSSY | GS | TCRASQS | TCRASQS | EQLKS |
| | SGYSFT | LQSSGLYSLSSVVT | ID NO: | WMHWVRQA | (SEQ | ISSSLAW | ISSYLAW | GTASV |
| | SYYMHW | VPSSSLGTQTYICN | 30) | PGKGLEWV | ID NO: | YQQKPGK | YQQKPGK | VCLLN |
| | VRQAPG | VNHKPSNTKVDKKV | | SYISGSGG | 22) | APKLLIY | APKLLIY | NFYPR |
| | QGLEWM | EPKSCDKTHTCPPC | | YTNYADSV | | AASSLQS | AASSLQS | EAKVQ |
| | GIINPS | PAPEAAGAPSVELE | | KGRFTISR | | GVPSRFS | GVPSRFS | WKVDN |
| | GGSTSY | PPKPKDTLMISRTP | | DNSKNTLY | | GSGSGTD | GSGSGTD | ALQSG |
| | AQKFQG | EVTCVVVDVSHEDP | | LQMNSLRA | | FTLTISS | FTLTISS | NSQES |
| | RVTMTR | EVKFNWYVDGVEVH | | EDTAVYYC | | LQPEDFA | LQPEDFA | VTEQD |
| | DTSTST | NAKTKPREEQYNST | | ARDRPYYY | | TYYCQQY | TYYCQQS | SKDST |
| | VYMELS | YRVVSVLTVLHQDW | | DMDVWGKG | | KSYPVTE | YSTPPTF | YSLSS |
| | SLNSED | LNGKEYKCKVSNKA | | TTVTVSS | | GQGTKVE | GPGTKVD | TLTLS |
| | TAVYYC | LPAPIEKTISKAKG | | (SEQ ID | | IK (SEQ | IK (SEQ | KADYE |
| | ASGWVY | QPREPQVYTLPPSR | | NO: | | ID NO: | ID NO: | KHKVY |
| | WGQGTL | EEMTKNQVSLTCLV | | 1445) | | 1367) | 1479) | ACEVT |
| | VTVSS | KGFYPSDIAVEWES | | | | | | HQGLS |
| | (SEQ | NGQPENNYKTTPPV | | | | | | SPVTK |
| | ID NO: | LDSDGSFFLYSKLT | | | | | | SFNRG |
| | 1598) | VDKSRWQQGNVFSC | | | | | | EC |
| | | SVMHEALHNHYTQK | | | | | | (SEQ |
| | | SLSLSPG (SEQ | | | | | | ID |
| | | ID NO: 44) | | | | | | NO: |
| | | | | | | | | 45) |
| PMAB122 | EVQLVQ | ASTKGPSVFPLAPS | GGGGSG | EVQLLESG | GGGGSG | DIQMTQS | DIQMTQS | RTVAA |
| | SGAEVK | SKSTSGGTAALGCL | GGGSGG | GGLVQPGG | GGGSGG | PSSLSAS | PSSLSAS | PSVFI |
| | KPGASV | VKDYFPEPVTVSWN | GGS | SLRLSCAA | GGSGGG | VGDRVTI | VGDRVTI | FPPSD |
| | KVSCKA | SGALTSGVHTFPAV | (SEQ | SGFTFSSY | GS | TCRASQS | TCRASQS | EQLKS |
| | SGYSFT | LQSSGLYSLSSVVT | ID NO: | WMHWVRQA | (SEQ | ISSSLAW | ILSYLAW | GTASV |
| | SYYMHW | VPSSSLGTQTYICN | 30) | PGKGLEWV | ID NO: | YQQKPGK | YQQKPGK | VCLLN |
| | VRQAPG | VNHKPSNTKVDKKV | | SYISGSGG | 22) | APKLLIY | APKLLIY | NFYPR |
| | QGLEWM | EPKSCDKTHTCPPC | | YTNYADSV | | AASSLQS | AASSLQS | EAKVQ |
| | GIINPS | PAPEAAGAPSVELE | | KGRFTISR | | GVPSRFS | GVPSRFS | WKVDN |
| | GGSTSY | PPKPKDTLMISRTP | | DNSKNTLY | | GSGSGTD | GSGSGTD | ALQSG |
| | AQKFQG | EVTCVVVDVSHEDP | | LQMNSLRA | | FTLTISS | FTLTISS | NSQES |
| | RVTMTR | EVKFNWYVDGVEVH | | EDTAVYYC | | LQPEDFA | LQPEDFA | VTEQD |
| | DTSTST | NAKTKPREEQYNST | | ARDRPYYY | | TYYCQQY | TYYCQQS | SKDST |
| | VYMELS | YRVVSVLTVLHQDW | | DMDVWGKG | | KSYPVTE | YSTPPTF | YSLSS |
| | SLRSED | LNGKEYKCKVSNKA | | TTVTVSS | | GQGTKVE | GPGTKVD | TLTLS |
| | TAVYYC | LPAPIEKTISKAKG | | (SEQ ID | | IK (SEQ | IK (SEQ | KADYE |
| | ASGWVY | QPREPQVYTLPPSR | | NO: | | ID NO: | ID NO: | KHKVY |
| | WGQGTL | EEMTKNQVSLTCLV | | 1445) | | 1367) | 1599) | ACEVT |
| | VTVSS | KGFYPSDIAVEWES | | | | | | HQGLS |
| | (SEQ | NGQPENNYKTTPPV | | | | | | SPVTK |
| | ID NO: | LDSDGSFFLYSKLT | | | | | | SFNRG |
| | 1478) | VDKSRWQQGNVFSC | | | | | | EC |
| | | SVMHEALHNHYTQK | | | | | | (SEQ |
| | | SLSLSPG (SEQ | | | | | | ID |
| | | ID NO: 44) | | | | | | NO: |
| | | | | | | | | 45) |
| PMAB123 | EVQLVQ | ASTKGPSVFPLAPS | GGGGSG | EVQLLESG | GGGGSG | DIQMTQS | DIQMTQS | RTVAA |
| | SGAEVK | SKSTSGGTAALGCL | GGGSGG | GGLVQPGG | GGGSGG | PSSLSAS | PSSLSAS | PSVFI |
| | KPGASV | VKDYFPEPVTVSWN | GGS | SLRLSCAA | GGSGGG | VGDRVTI | VGDRVTI | FPPSD |
| | KVSCKA | SGALTSGVHTFPAV | (SEQ | SGFTFSSY | GS | TCRASQS | TCRASQS | EQLKS |
| | SGYSFT | LQSSGLYSLSSVVT | ID NO: | WMHWVRQA | (SEQ | ISSSLAW | INSYLAW | GTASV |
| | SYYMHW | VPSSSLGTQTYICN | 30) | PGKGLEWV | ID NO: | YQQKPGK | YQQKPGK | VCLLN |
| | VRQAPG | VNHKPSNTKVDKKV | | SYISGSGG | 22) | APKLLIY | APKLLIY | NFYPR |
| | QGLEWM | EPKSCDKTHTCPPC | | YTNYADSV | | AASSLQS | AASSLQS | EAKVQ |
| | GIINPS | PAPEAAGAPSVELE | | KGRFTISR | | GVPSRFS | GVPSRFS | WKVDN |
| | GGSTSY | PPKPKDTLMISRTP | | DNSKNTLY | | GSGSGTD | GSGSGTD | ALQSG |
| | AQKFQG | EVTCVVVDVSHEDP | | LQMNSLRA | | FTLTISS | FTLTISS | NSQES |
| | RVTMTR | EVKFNWYVDGVEVH | | EDTAVYYC | | LQPEDFA | LQPEDFA | VTEQD |
| | DTSTST | NAKTKPREEQYNST | | ARDRPYYY | | TYYCQQY | TYYCQQS | SKDST |
| | VYMELS | YRVVSVLTVLHQDW | | DMDVWGKG | | KSYPVTE | YSTPPTF | YSLSS |
| | SLRSED | LNGKEYKCKVSNKA | | TTVTVSS | | GQGTKVE | GPGTKVD | TLTLS |
| | TAVYYC | LPAPIEKTISKAKG | | (SEQ ID | | IK (SEQ | IK (SEQ | KADYE |
| | ASGWVY | QPREPQVYTLPPSR | | NO: | | ID NO: | ID NO: | KHKVY |
| | WGQGTL | EEMTKNQVSLTCLV | | 1445) | | 1367) | 1600) | ACEVT |
| | VTVSS | KGFYPSDIAVEWES | | | | | | HQGLS |
| | (SEQ | NGQPENNYKTTPPV | | | | | | SPVTK |
| | ID NO: | LDSDGSFFLYSKLT | | | | | | SFNRG |
| | 1478) | VDKSRWQQGNVFSC | | | | | | EC |
| | | SVMHEALHNHYTQK | | | | | | (SEQ |
| | | SLSLSPG (SEQ | | | | | | ID |
| | | ID NO: 44) | | | | | | NO: |
| | | | | | | | | 45) |
| PMAB124 | EVQLVQ | ASTKGPSVFPLAPS | GGGGSG | EVQLLESG | GGGGSG | DIQMTQS | DIQMTQS | RTVAA |
| | SGAEVK | SKSTSGGTAALGCL | GGGSGG | GGLVQPGG | GGGSGG | PSSLSAS | PSSLSAS | PSVFI |
| | KPGASV | VKDYFPEPVTVSWN | GGS | SLRLSCAA | GGSGGG | VGDRVTI | VGDRVTI | FPPSD |
| | KVSCKA | SGALTSGVHTFPAV | (SEQ | SGFTFSSY | GS | TCRASQS | TCRASQS | EQLKS |
| | SGYSFT | LQSSGLYSLSSVVT | ID NO: | WMHWVRQA | (SEQ | ISSSLAW | ISSYLAW | GTASV |
| | SYYMHW | VPSSSLGTQTYICN | 30) | PGKGLEWV | ID NO: | YQQKPGK | YQQKPGA | VCLLN |
| | VRQAPG | VNHKPSNTKVDKKV | | SYISGSGG | 22) | APKLLIY | APKLLIY | NFYPR |
| | QGLEWM | EPKSCDKTHTCPPC | | YTNYADSV | | AASSLQS | AASSLQS | EAKVQ |
| | GIINPS | PAPEAAGAPSVELE | | KGRFTISR | | GVPSRFS | GVPSRFS | WKVDN |
| | GGSTSY | PPKPKDTLMISRTP | | DNSKNTLY | | GSGSGTD | GSGSGTD | ALQSG |
| | AQKFQG | EVTCVVVDVSHEDP | | LQMNSLRA | | FTLTISS | FTLTISS | NSQES |
| | RVTMTR | EVKFNWYVDGVEVH | | EDTAVYYC | | LQPEDFA | LQPEDFA | VTEQD |
| | DTSTST | NAKTKPREEQYNST | | ARDRPYYY | | TYYCQQY | TYYCQQS | SKDST |
| | VYMELS | YRVVSVLTVLHQDW | | DMDVWGKG | | KSYPVTE | YSTPPTF | YSLSS |
| | SLRSED | LNGKEYKCKVSNKA | | TTVTVSS | | GQGTKVE | GPGTKVD | TLTLS |
| | TAVYYC | LPAPIEKTISKAKG | | (SEQ ID | | IK (SEQ | IK (SEQ | KADYE |
| | ASGWVY | QPREPQVYTLPPSR | | NO: | | ID NO: | ID NO: | KHKVY |
| | WGQGTL | EEMTKNQVSLTCLV | | 1445) | | 1367) | 1601) | ACEVT |
| | VTVSS | KGFYPSDIAVEWES | | | | | | HQGLS |
| | (SEQ | NGQPENNYKTTPPV | | | | | | SPVTK |
| | ID NO: | LDSDGSFFLYSKLT | | | | | | SFNRG |
| | 1478) | VDKSRWQQGNVFSC | | | | | | EC |
| | | SVMHEALHNHYTQK | | | | | | (SEQ |
| | | SLSLSPG (SEQ | | | | | | ID |
| | | ID NO: 44) | | | | | | NO: |
| | | | | | | | | 45) |
| PMAB125 | EVQLVQ | ASTKGPSVFPLAPS | GGGGSG | EVQLLESG | GGGGSG | DIQMTQS | DIQMTQS | RTVAA |
| | SGAEVK | SKSTSGGTAALGCL | GGGSGG | GGLVQPGG | GGGSGG | PSSLSAS | PSSLSAS | PSVFI |
| | KPGASV | VKDYFPEPVTVSWN | GGS | SLRLSCAA | GGSGGG | VGDRVTI | VGDRVTI | FPPSD |
| | KVSCKA | SGALTSGVHTFPAV | (SEQ | SGFTFSSY | GS | TCRASQS | TCRASQS | EQLKS |
| | SGYSFT | LQSSGLYSLSSVVT | ID NO: | WMHWVRQA | (SEQ | ISSSLAW | ISSYLAW | GTASV |
| | SYYMHW | VPSSSLGTQTYICN | 30) | PGKGLEWV | ID NO: | YQQKPGK | YQQKPGN | VCLLN |
| | VRQAPG | VNHKPSNTKVDKKV | | SYISGSGG | 22) | APKLLIY | APKLLIY | NFYPR |
| | QGLEWM | EPKSCDKTHTCPPC | | YTNYADSV | | AASSLQS | AASSLQS | EAKVQ |
| | GIINPS | PAPEAAGAPSVELE | | KGRFTISR | | GVPSRFS | GVPSRFS | WKVDN |
| | GGSTSY | PPKPKDTLMISRTP | | DNSKNTLY | | GSGSGTD | GSGSGTD | ALQSG |
| | AQKFQG | EVTCVVVDVSHEDP | | LQMNSLRA | | FTLTISS | FTLTISS | NSQES |
| | RVTMTR | EVKFNWYVDGVEVH | | EDTAVYYC | | LQPEDFA | LQPEDFA | VTEQD |
| | DTSTST | NAKTKPREEQYNST | | ARDRPYYY | | TYYCQQY | TYYCQQS | SKDST |
| | VYMELS | YRVVSVLTVLHQDW | | DMDVWGKG | | KSYPVTE | YSTPPTF | YSLSS |
| | SLRSED | LNGKEYKCKVSNKA | | TTVTVSS | | GQGTKVE | GPGTKVD | TLTLS |
| | TAVYYC | LPAPIEKTISKAKG | | (SEQ ID | | IK (SEQ | IK (SEQ | KADYE |
| | ASGWVY | QPREPQVYTLPPSR | | NO: | | ID NO: | ID NO: | KHKVY |
| | WGQGTL | EEMTKNQVSLTCLV | | 1445) | | 1367) | 1602) | ACEVT |
| | VTVSS | KGFYPSDIAVEWES | | | | | | HQGLS |
| | (SEQ | NGQPENNYKTTPPV | | | | | | SPVTK |
| | ID NO: | LDSDGSFFLYSKLT | | | | | | SFNRG |
| | 1478) | VDKSRWQQGNVFSC | | | | | | EC |
| | | SVMHEALHNHYTQK | | | | | | (SEQ |
| | | SLSLSPG (SEQ | | | | | | ID |
| | | ID NO: 44) | | | | | | NO: |
| | | | | | | | | 45) |
| PMAB126 | EVQLVQ | ASTKGPSVFPLAPS | GGGGSG | EVQLLESG | GGGGSG | DIQMTQS | DIQMTQS | RTVAA |
| | SGAEVK | SKSTSGGTAALGCL | GGGSGG | GGLVQPGG | GGGSGG | PSSLSAS | PSSLSAS | PSVFI |
| | KPGASV | VKDYFPEPVTVSWN | GGS | SLRLSCAA | GGSGGG | VGDRVTI | VGDRVTI | FPPSD |
| | KVSCKA | SGALTSGVHTFPAV | (SEQ | SGFTFSSY | GS | TCRASQS | TCRASQS | EQLKS |
| | SGYSFT | LQSSGLYSLSSVVT | ID NO: | WMHWVRQA | (SEQ | ISSSLAW | ISSYLAW | GTASV |
| | SYYMHW | VPSSSLGTQTYICN | 30) | PGKGLEWV | ID NO: | YQQKPGK | YQQKPGS | VCLLN |
| | VRQAPG | VNHKPSNTKVDKKV | | SYISGSGG | 22) | APKLLIY | APKLLIY | NFYPR |
| | QGLEWM | EPKSCDKTHTCPPC | | YTNYADSV | | AASSLQS | AASSLQS | EAKVQ |
| | GIINPS | PAPEAAGAPSVELE | | KGRFTISR | | GVPSRFS | GVPSRFS | WKVDN |
| | GGSTSY | PPKPKDTLMISRTP | | DNSKNTLY | | GSGSGTD | GSGSGTD | ALQSG |
| | AQKFQG | EVTCVVVDVSHEDP | | LQMNSLRA | | FTLTISS | FTLTISS | NSQES |
| | RVTMTR | EVKFNWYVDGVEVH | | EDTAVYYC | | LQPEDFA | LQPEDFA | VTEQD |
| | DTSTST | NAKTKPREEQYNST | | ARDRPYYY | | TYYCQQY | TYYCQQS | SKDST |
| | VYMELS | YRVVSVLTVLHQDW | | DMDVWGKG | | KSYPVTE | YSTPPTF | YSLSS |
| | SLRSED | LNGKEYKCKVSNKA | | TTVTVSS | | GQGTKVE | GPGTKVD | TLTLS |
| | TAVYYC | LPAPIEKTISKAKG | | (SEQ ID | | IK (SEQ | IK (SEQ | KADYE |
| | ASGWVY | QPREPQVYTLPPSR | | NO: | | ID NO: | ID NO: | KHKVY |
| | WGQGTL | EEMTKNQVSLTCLV | | 1445) | | 1367) | 1603) | ACEVT |
| | VTVSS | KGFYPSDIAVEWES | | | | | | HQGLS |
| | (SEQ | NGQPENNYKTTPPV | | | | | | SPVTK |
| | ID NO: | LDSDGSFFLYSKLT | | | | | | SFNRG |
| | 1478) | VDKSRWQQGNVFSC | | | | | | EC |
| | | SVMHEALHNHYTQK | | | | | | (SEQ |
| | | SLSLSPG (SEQ | | | | | | ID |
| | | ID NO: 44) | | | | | | NO: |
| | | | | | | | | 45) |
| PMAB127 | EVQLVQ | ASTKGPSVFPLAPS | GGGGSG | EVQLLESG | GGGGSG | DIQMTQS | DIQMTQS | RTVAA |
| | SGAEVK | SKSTSGGTAALGCL | GGGSGG | GGLVQPGG | GGGSGG | PSSLSAS | PSSLSAS | PSVFI |
| | KPGASV | VKDYFPEPVTVSWN | GGS | SLRLSCAA | GGSGGG | VGDRVTI | VGDTVTI | FPPSD |
| | KVSCKA | SGALTSGVHTFPAV | (SEQ | SGFTFSSY | GS | TCRASQS | TCRASQS | EQLKS |
| | SGYSFT | LQSSGLYSLSSVVT | ID NO: | WMHWVRQA | (SEQ | ISSSLAW | ISSYLAW | GTASV |
| | SYYMHW | VPSSSLGTQTYICN | 30) | PGKGLEWV | ID NO: | YQQKPGK | YQQKPGK | VCLLN |
| | VRQAPG | VNHKPSNTKVDKKV | | SYISGSGG | 22) | APKLLIY | APKLLIY | NFYPR |
| | QGLEWM | EPKSCDKTHTCPPC | | YTNYADSV | | AASSLQS | AASSLQS | EAKVQ |
| | GIINPS | PAPEAAGAPSVELE | | KGRFTISR | | GVPSRFS | GVPSRFS | WKVDN |
| | GGSTSY | PPKPKDTLMISRTP | | DNSKNTLY | | GSGSGTD | GSGSGTD | ALQSG |
| | AQKFQG | EVTCVVVDVSHEDP | | LQMNSLRA | | FTLTISS | FTLTISS | NSQES |
| | RVTMTR | EVKFNWYVDGVEVH | | EDTAVYYC | | LQPEDFA | LQPEDFA | VTEQD |
| | DTSTST | NAKTKPREEQYNST | | ARDRPYYY | | TYYCQQY | TYYCQQS | SKDST |
| | VYMELS | YRVVSVLTVLHQDW | | DMDVWGKG | | KSYPVTE | YSTPPTF | YSLSS |
| | SLRSED | LNGKEYKCKVSNKA | | TTVTVSS | | GQGTKVE | GPGTKVD | TLTLS |
| | TAVYYC | LPAPIEKTISKAKG | | (SEQ ID | | IK (SEQ | IK (SEQ | KADYE |
| | ASGWVY | QPREPQVYTLPPSR | | NO: | | ID NO: | ID NO: | KHKVY |
| | WGQGTL | EEMTKNQVSLTCLV | | 1445) | | 1367) | 1604) | ACEVT |
| | VTVSS | KGFYPSDIAVEWES | | | | | | HQGLS |
| | (SEQ | NGQPENNYKTTPPV | | | | | | SPVTK |
| | ID NO: | LDSDGSFFLYSKLT | | | | | | SFNRG |
| | 1478) | VDKSRWQQGNVFSC | | | | | | EC |
| | | SVMHEALHNHYTQK | | | | | | (SEQ |
| | | SLSLSPG (SEQ | | | | | | ID |
| | | ID NO: 44) | | | | | | NO: |
| | | | | | | | | 45) |
| PMAB128 | EVQLVQ | ASTKGPSVFPLAPS | GGGGSG | EVQLLESG | GGGGSG | DIQMTQS | DIQMTQS | RTVAA |
| | SGAEVK | SKSTSGGTAALGCL | GGGSGG | GGLVQPGG | GGGSGG | PSSLSAS | PSSLSAS | PSVFI |
| | KPGASV | VKDYFPEPVTVSWN | GGS | SLRLSCAA | GGSGGG | VGDRVTI | VGDRVTI | FPPSD |
| | KVSCKA | SGALTSGVHTFPAV | (SEQ | SGFTFSSY | GS | TCRASQS | TCRASQS | EQLKS |
| | SGYSFT | LQSSGLYSLSSVVT | ID NO: | WMHWVRQA | (SEQ | ISSSLAW | ISSYLAW | GTASV |
| | SYYMHW | VPSSSLGTQTYICN | 30) | PGKGLEWV | ID NO: | YQQKPGK | YQQKPGK | VCLLN |
| | VRQAPG | VNHKPSNTKVDKKV | | SYISGSGG | 22) | APKLLIY | APKLLIA | NFYPR |
| | QGLEWM | EPKSCDKTHTCPPC | | YTNYADSV | | AASSLQS | AASSLQS | EAKVQ |
| | GIINPS | PAPEAAGAPSVELE | | KGRFTISR | | GVPSRFS | GVPSRFS | WKVDN |
| | GGSTSY | PPKPKDTLMISRTP | | DNSKNTLY | | GSGSGTD | GSGSGTD | ALQSG |
| | AQKFQG | EVTCVVVDVSHEDP | | LQMNSLRA | | FTLTISS | FTLTISS | NSQES |
| | RVTMTR | EVKFNWYVDGVEVH | | EDTAVYYC | | LQPEDFA | LQPEDFA | VTEQD |
| | DTSTST | NAKTKPREEQYNST | | ARDRPYYY | | TYYCQQY | TYYCQQS | SKDST |
| | VYMELS | YRVVSVLTVLHQDW | | DMDVWGKG | | KSYPVTE | YSTPPTF | YSLSS |
| | SLRSED | LNGKEYKCKVSNKA | | TTVTVSS | | GQGTKVE | GPGTKVD | TLTLS |
| | TAVYYC | LPAPIEKTISKAKG | | (SEQ ID | | IK (SEQ | IK (SEQ | KADYE |
| | ASGWVY | QPREPQVYTLPPSR | | NO: | | ID NO: | ID NO: | KHKVY |
| | WGQGTL | EEMTKNQVSLTCLV | | 1445) | | 1367) | 1605) | ACEVT |
| | VTVSS | KGFYPSDIAVEWES | | | | | | HQGLS |
| | (SEQ | NGQPENNYKTTPPV | | | | | | SPVTK |
| | ID NO: | LDSDGSFFLYSKLT | | | | | | SFNRG |
| | 1478) | VDKSRWQQGNVFSC | | | | | | EC |
| | | SVMHEALHNHYTQK | | | | | | (SEQ |
| | | SLSLSPG (SEQ | | | | | | ID |
| | | ID NO: 44) | | | | | | NO: |
| | | | | | | | | 45) |
| PMAB129 | EVQLVQ | ASTKGPSVFPLAPS | GGGGSG | EVQLLESG | GGGGSG | DIQMTQS | DIQMTQS | RTVAA |
| | SGAEVK | SKSTSGGTAALGCL | GGGSGG | GGLVQPGG | GGGSGG | PSSLSAS | PSSLSAS | PSVFI |
| | KPGASV | VKDYFPEPVTVSWN | GGS | SLRLSCAA | GGSGGG | VGDRVTI | VGDRVTI | FPPSD |
| | KVSCKA | SGALTSGVHTFPAV | (SEQ | SGFTFSSY | GS | TCRASQS | TCQASRD | EQLKS |
| | SGYSFT | LQSSGLYSLSSVVT | ID NO: | WMHWVRQA | (SEQ | ISSSLAW | IKNYLAW | GTASV |
| | SYYMHW | VPSSSLGTQTYICN | 30) | PGKGLEWV | ID NO: | YQQKPGK | YQQKPGK | VCLLN |
| | VRQAPG | VNHKPSNTKVDKKV | | SYISGSGG | 22) | APKLLIY | APKLLIY | NFYPR |
| | QGLEWM | EPKSCDKTHTCPPC | | YTNYADSV | | AASSLQS | AASSLQS | EAKVQ |
| | GIINPS | PAPEAAGAPSVELE | | KGRFTISR | | GVPSRFS | GVPSRFS | WKVDN |
| | GGSTSY | PPKPKDTLMISRTP | | DNSKNTLY | | GSGSGTD | GSGSGTD | ALQSG |
| | AQKFQG | EVTCVVVDVSHEDP | | LQMNSLRA | | FTLTISS | FTLTISS | NSQES |
| | RVTMTR | EVKFNWYVDGVEVH | | EDTAVYYC | | LQPEDFA | LQPEDFA | VTEQD |
| | DTSTST | NAKTKPREEQYNST | | ARDRPYYY | | TYYCQQY | TYYCQQS | SKDST |
| | VYMELS | YRVVSVLTVLHQDW | | DMDVWGKG | | KSYPVTE | YSTPPTF | YSLSS |
| | SLRSED | LNGKEYKCKVSNKA | | TTVTVSS | | GQGTKVE | GPGTKVD | TLTLS |
| | TAVYYC | LPAPIEKTISKAKG | | (SEQ ID | | IK (SEQ | IK (SEQ | KADYE |
| | ASGWVY | QPREPQVYTLPPSR | | NO: | | ID NO: | ID NO: | KHKVY |
| | WGQGTL | EEMTKNQVSLTCLV | | 1445) | | 1367) | 1449) | ACEVT |
| | VTVSS | KGFYPSDIAVEWES | | | | | | HQGLS |
| | (SEQ | NGQPENNYKTTPPV | | | | | | SPVTK |
| | ID NO: | LDSDGSFFLYSKLT | | | | | | SFNRG |
| | 1478) | VDKSRWQQGNVFSC | | | | | | EC |
| | | SVMHEALHNHYTQK | | | | | | (SEQ |
| | | SLSLSPG (SEQ | | | | | | ID |
| | | ID NO: 44) | | | | | | NO: |
| | | | | | | | | 45) |
| PMAB130 | EVQLLE | ASTKGPSVFPLAPS | GGGGSG | EVQLLESG | GGGGSG | DIQMTQS | DIQMTQS | RTVAA |
| | SGGGLV | SKSTSGGTAALGCL | GGGSGG | GGLVQPGG | GGGSGG | PSSLSAS | PSSLSAS | PSVFI |
| | QPGGSL | VKDYFPEPVTVSWN | GGS | SLRLSCAA | GGSGGG | VGDRVTI | VGDRVTI | FPPSD |
| | RLSCAA | SGALTSGVHTFPAV | (SEQ | SGFTFSSY | GS | TCRASQS | TCQASRD | EQLKS |
| | SGYSFT | LQSSGLYSLSSVVT | ID NO: | WMHWVRQA | (SEQ | ISSSLAW | IKNYLAW | GTASV |
| | TYYMHW | VPSSSLGTQTYICN | 30) | PGKGLEWV | ID NO: | YQQKPGK | YQQKPGK | VCLLN |
| | WVRQAP | VNHKPSNTKVDKKV | | SYISGSGG | 22) | APKLLIY | APKLLIY | NFYPR |
| | GKGLEW | EPKSCDKTHTCPPC | | YTNYADSV | | AASSLQS | AASSLQS | EAKVQ |
| | MGIINP | PAPEAAGAPSVELE | | KGRFTISR | | GVPSRFS | GVPSRFS | WKVDN |
| | SGGSTS | PPKPKDTLMISRTP | | DNSKNTLY | | GSGSGTD | GSGSGTD | ALQSG |
| | YADSVK | EVTCVVVDVSHEDP | | LQMNSLRA | | FTLTISS | FTLTISS | NSQES |
| | GRFTIS | EVKFNWYVDGVEVH | | EDTAVYYC | | LQPEDFA | LQPEDFA | VTEQD |
| | RDNSKN | NAKTKPREEQYNST | | ARDRPYYY | | TYYCQQY | TYYCQQS | SKDST |
| | TLYLQM | YRVVSVLTVLHQDW | | DMDVWGKG | | KSYPVTE | YSTPPTF | YSLSS |
| | NSLRAE | LNGKEYKCKVSNKA | | TTVTVSS | | GQGTKVE | GPGTKVD | TLTLS |
| | DTAVYY | LPAPIEKTISKAKG | | (SEQ ID | | IK (SEQ | IK (SEQ | KADYE |
| | CASGWV | QPREPQVYTLPPSR | | NO: | | ID NO: | ID NO: | KHKVY |
| | YWGQGT | EEMTKNQVSLTCLV | | 1445) | | 1367) | 1449) | ACEVT |
| | TVTVSS | KGFYPSDIAVEWES | | | | | | HQGLS |
| | (SEQ | NGQPENNYKTTPPV | | | | | | SPVTK |
| | ID NO: | LDSDGSFFLYSKLT | | | | | | SFNRG |
| | 1606) | VDKSRWQQGNVFSC | | | | | | EC |
| | | SVMHEALHNHYTQK | | | | | | (SEQ |
| | | SLSLSPG (SEQ | | | | | | ID |
| | | ID NO: 44) | | | | | | NO: |
| | | | | | | | | 45) |
| PMAB131 | QVQLVQ | ASTKGPSVFPLAPS | GGGGSG | EVQLLESG | GGGGSG | DIQMTQS | DIVMTQS | RTVAA |
| | SGAEVK | SKSTSGGTAALGCL | GGGSGG | GGLVQPGG | GGGSGG | PSSLSAS | PDSLAVS | PSVFI |
| | KPGASV | VKDYFPEPVTVSWN | GGS | SLRLSCAA | GGSGGG | VGDRVTI | LGERATI | FPPSD |
| | KVSCKA | SGALTSGVHTFPAV | (SEQ | SGFTFSSY | GS | TCRASQS | NCQASRD | EQLKS |
| | SGYSFT | LQSSGLYSLSSVVT | ID NO: | WMHWVRQA | (SEQ | ISSSLAW | IKNYLAW | GTASV |
| | TYYMHW | VPSSSLGTQTYICN | 30) | PGKGLEWV | ID NO: | YQQKPGK | YQQKPGQ | VCLLN |
| | VRQAPG | VNHKPSNTKVDKKV | | SYISGSGG | 22) | APKLLIY | PPKLLIY | NFYPR |
| | QGLEWM | EPKSCDKTHTCPPC | | YTNYADSV | | AASSLQS | AASSLQS | EAKVQ |
| | GIIAPS | PAPEAAGAPSVELE | | KGRFTISR | | GVPSRFS | GVPDRFS | WKVDN |
| | GGSTSY | PPKPKDTLMISRTP | | DNSKNTLY | | GSGSGTD | GSGSGTD | ALQSG |
| | AQKFQG | EVTCVVVDVSHEDP | | LQMNSLRA | | FTLTISS | FTLTISS | NSQES |
| | RVTMTR | EVKFNWYVDGVEVH | | EDTAVYYC | | LQPEDFA | LQAEDVA | VTEQD |
| | DTSTST | NAKTKPREEQYNST | | ARDRPYYY | | TYYCQQY | VYYCQQS | SKDST |
| | VYMELS | YRVVSVLTVLHQDW | | DMDVWGKG | | KSYPVTE | YSTPPTF | YSLSS |
| | SLRSED | LNGKEYKCKVSNKA | | TTVTVSS | | GQGTKVE | GQGTRLE | TLTLS |
| | TAVYYC | LPAPIEKTISKAKG | | (SEQ ID | | IK (SEQ | IK (SEQ | KADYE |
| | ASGWVY | QPREPQVYTLPPSR | | NO: | | ID NO: | ID NO: | KHKVY |
| | WGQGTL | EEMTKNQVSLTCLV | | 1445) | | 1367) | 1607) | ACEVT |
| | VTVSS | KGFYPSDIAVEWES | | | | | | HQGLS |
| | (SEQ | NGQPENNYKTTPPV | | | | | | SPVTK |
| | ID NO: | LDSDGSFFLYSKLT | | | | | | SFNRG |
| | 1588) | VDKSRWQQGNVFSC | | | | | | EC |
| | | SVMHEALHNHYTQK | | | | | | (SEQ |
| | | SLSLSPG (SEQ | | | | | | ID |
| | | ID NO: 44) | | | | | | NO: |
| | | | | | | | | 45) |
| PMAB132 | EVQLLE | ASTKGPSVFPLAPS | GGGGSG | EVQLLESG | GGGGSG | DIQMTQS | DIVMTQS | RTVAA |
| | SGGGLV | SKSTSGGTAALGCL | GGGSGG | GGLVQPGG | GGGSGG | PSSLSAS | PDSLAVS | PSVFI |
| | QPGGSL | VKDYFPEPVTVSWN | GGS | SLRLSCAA | GGSGGG | VGDRVTI | LGERATI | FPPSD |
| | RLSCAA | SGALTSGVHTFPAV | (SEQ | SGFTFSSY | GS | TCRASQS | NCQASRD | EQLKS |
| | SGYSFT | LQSSGLYSLSSVVT | ID NO: | WMHWVRQA | (SEQ | ISSSLAW | IKNYLAW | GTASV |
| | TYYMHW | VPSSSLGTQTYICN | 30) | PGKGLEWV | ID NO: | YQQKPGK | YQQKPGQ | VCLLN |
| | WVRQAP | VNHKPSNTKVDKKV | | SYISGSGG | 22) | APKLLIY | PPKLLIY | NFYPR |
| | GKGLEW | EPKSCDKTHTCPPC | | YTNYADSV | | AASSLQS | AASSLQS | EAKVQ |
| | MGIINP | PAPEAAGAPSVELE | | KGRFTISR | | GVPSRFS | GVPDRFS | WKVDN |
| | SGGSTS | PPKPKDTLMISRTP | | DNSKNTLY | | GSGSGTD | GSGSGTD | ALQSG |
| | YADSVK | EVTCVVVDVSHEDP | | LQMNSLRA | | FTLTISS | FTLTISS | NSQES |
| | GRFTIS | EVKFNWYVDGVEVH | | EDTAVYYC | | LQPEDFA | LQAEDVA | VTEQD |
| | RDNSKN | NAKTKPREEQYNST | | ARDRPYYY | | TYYCQQY | VYYCQQS | SKDST |
| | TLYLQM | YRVVSVLTVLHQDW | | DMDVWGKG | | KSYPVTE | YSTPPTF | YSLSS |
| | NSLRAE | LNGKEYKCKVSNKA | | TTVTVSS | | GQGTKVE | GQGTRLE | TLTLS |
| | DTAVYY | LPAPIEKTISKAKG | | (SEQ ID | | IK (SEQ | IK (SEQ | KADYE |
| | CASGWV | QPREPQVYTLPPSR | | NO: | | ID NO: | ID NO: | KHKVY |
| | YWGQGT | EEMTKNQVSLTCLV | | 1445) | | 1367) | 1607) | ACEVT |
| | TVTVSS | KGFYPSDIAVEWES | | | | | | HQGLS |
| | (SEQ | NGQPENNYKTTPPV | | | | | | SPVTK |
| | ID NO: | LDSDGSFFLYSKLT | | | | | | SFNRG |
| | 1606) | VDKSRWQQGNVFSC | | | | | | EC |
| | | SVMHEALHNHYTQK | | | | | | (SEQ |
| | | SLSLSPG (SEQ | | | | | | ID |
| | | ID NO: 44) | | | | | | NO: |
| | | | | | | | | 45) |
| PMAB133 | EVQLVQ | ASTKGPSVFPLAPS | GGGGSG | EVQLLESG | GGGGSG | DIQMTQS | DIVMTQS | RTVAA |
| | SGAEVK | SKSTSGGTAALGCL | GGGSGG | GGLVQPGG | GGGSGG | PSSLSAS | PDSLAVS | PSVFI |
| | KPGASV | VKDYFPEPVTVSWN | GGS | SLRLSCAA | GGSGGG | VGDRVTI | LGERATI | FPPSD |
| | KVSCKA | SGALTSGVHTFPAV | (SEQ | SGFTFSSY | GS | TCRASQS | NCQASRD | EQLKS |
| | SGYSFT | LQSSGLYSLSSVVT | ID NO: | WMHWVRQA | (SEQ | ISSSLAW | IKNYLAW | GTASV |
| | SYYMHW | VPSSSLGTQTYICN | 30) | PGKGLEWV | ID NO: | YQQKPGK | YQQKPGQ | VCLLN |
| | VRQAPG | VNHKPSNTKVDKKV | | SYISGSGG | 22) | APKLLIY | PPKLLIY | NFYPR |
| | QGLEWM | EPKSCDKTHTCPPC | | YTNYADSV | | AASSLQS | AASSLQS | EAKVQ |
| | GIINPS | PAPEAAGAPSVELE | | KGRFTISR | | GVPSRFS | GVPDRFS | WKVDN |
| | GGSTSY | PPKPKDTLMISRTP | | DNSKNTLY | | GSGSGTD | GSGSGTD | ALQSG |
| | AQKFQG | EVTCVVVDVSHEDP | | LQMNSLRA | | FTLTISS | FTLTISS | NSQES |
| | RVTMTR | EVKFNWYVDGVEVH | | EDTAVYYC | | LQPEDFA | LQAEDVA | VTEQD |
| | DTSTST | NAKTKPREEQYNST | | ARDRPYYY | | TYYCQQY | VYYCQQS | SKDST |
| | VYMELS | YRVVSVLTVLHQDW | | DMDVWGKG | | KSYPVTE | YSTPPTF | YSLSS |
| | SLRSED | LNGKEYKCKVSNKA | | TTVTVSS | | GQGTKVE | GQGTRLE | TLTLS |
| | TAVYYC | LPAPIEKTISKAKG | | (SEQ ID | | IK (SEQ | IK (SEQ | KADYE |
| | ASGWVY | QPREPQVYTLPPSR | | NO: | | ID NO: | ID NO: | KHKVY |
| | WGQGTL | EEMTKNQVSLTCLV | | 1445) | | 1367) | 1607) | ACEVT |
| | VTVSS | KGFYPSDIAVEWES | | | | | | HQGLS |
| | (SEQ | NGQPENNYKTTPPV | | | | | | SPVTK |
| | ID NO: | LDSDGSFFLYSKLT | | | | | | SFNRG |
| | 1478) | VDKSRWQQGNVFSC | | | | | | EC |
| | | SVMHEALHNHYTQK | | | | | | (SEQ |
| | | SLSLSPG (SEQ | | | | | | ID |
| | | ID NO: 44) | | | | | | NO: |
| | | | | | | | | 45) |
| PMAB134 | EVQLLE | ASTKGPSVFPLAPS | GGGGSG | EVQLLESG | GGGGSG | DIQMTQS | DIVMTQS | RTVAA |
| | SGGGLV | SKSTSGGTAALGCL | GGGSGG | GGLVQPGG | GGGSGG | PSSLSAS | PDSLAVS | PSVFI |
| | QPGGSL | VKDYFPEPVTVSWN | GGS | SLRLSCAA | GGSGGG | VGDRVTI | LGERATI | FPPSD |
| | RLSCAA | SGALTSGVHTFPAV | (SEQ | SGFTFSDF | GS | TCRASQS | NCKSSQS | EQLKS |
| | SGFTFS | LQSSGLYSLSSVVT | ID NO: | WMHWVRQA | (SEQ | VSRSLAW | VLYSPNN | GTASV |
| | NSDMSW | VPSSSLGTQTYICN | 30) | PGKGLEWI | ID NO: | YQQKPGK | KNYLAWY | VCLLN |
| | VRQAPG | VNHKPSNTKVDKKV | | SYISGDSG | 22) | APKLLIY | QQKPGQP | NFYPR |
| | KGLEWV | EPKSCDKTHTCPPC | | YTNYADSV | | AASSLQS | PKLLIYW | EAKVQ |
| | SGITIS | PAPEAAGAPSVELE | | KGRFTISR | | GVPSRFS | ASTRESG | WKVDN |
| | GGSTYY | PPKPKDTLMISRTP | | DNSKNTLY | | GSGSGTD | VPDRFSG | ALQSG |
| | ADSVKG | EVTCVVVDVSHEDP | | LQMNSLRA | | FTLTISS | SGSGTDF | NSQES |
| | RFTISR | EVKFNWYVDGVEVH | | EDTAVYYC | | LQPEDFA | TLTISSL | VTEQD |
| | DNSKNT | NAKTKPREEQYNST | | ARDRPYYY | | TYYCQQY | QAEDVAV | SKDST |
| | LYLQMN | YRVVSVLTVLHQDW | | YMDVWGKG | | KSYPVTF | YYCQQYY | YSLSS |
| | SLRAED | LNGKEYKCKVSNKA | | TTVTVSS | | GQGTKVE | TTPPTFG | TLTLS |
| | TAVYYC | LPAPIEKTISKAKG | | (SEQ ID | | IK (SEQ | QGTRLEI | KADYE |
| | ARGRGG | QPREPQVYTLPPSR | | NO: 591) | | ID NO: | K (SEQ | KHKVY |
| | SGWLDY | EEMTKNQVSLTCLV | | | | 592) | ID NO: | ACEVT |
| | WGQGTL | KGFYPSDIAVEWES | | | | | 1359) | HQGLS |
| | VTVSS | NGQPENNYKTTPPV | | | | | | SPVTK |
| | (SEQ | LDSDGSFFLYSKLT | | | | | | SFNRG |
| | ID NO: | VDKSRWQQGNVFSC | | | | | | EC |
| | 1438) | SVMHEALHNHYTQK | | | | | | (SEQ |
| | | SLSLSPG (SEQ | | | | | | ID |
| | | ID NO: 44) | | | | | | NO: |
| | | | | | | | | 45) |
| PMAB135 | EVQLLE | ASTKGPSVFPLAPS | GGGGSG | EVQLLESG | GGGGSG | DIQMTQS | DIVMTQS | RTVAA |
| | SGGGLV | SKSTSGGTAALGCL | GGGSGG | GGLVQPGG | GGGSGG | PSSLSAS | PDSLAVS | PSVFI |
| | QPGGSL | VKDYFPEPVTVSWN | GGS | SLRLSCAA | GGSGGG | VGDRVTI | LGERATI | FPPSD |
| | RLSCAA | SGALTSGVHTFPAV | (SEQ | SGFTFSDF | GS | TCRASQS | NCKSSQS | EQLKS |
| | SGFTFS | LQSSGLYSLSSVVT | ID NO: | WMHWVRQA | (SEQ | VSRSLAW | VLYSPNN | GTASV |
| | SSDMSW | VPSSSLGTQTYICN | 30) | PGKGLEWI | ID NO: | YQQKPGK | KNYLAWY | VCLLN |
| | VRQAPG | VNHKPSNTKVDKKV | | SYISGDSG | 22) | APKLLIY | QQKPGQP | NFYPR |
| | KGLEWV | EPKSCDKTHTCPPC | | YTNYADSV | | AASSLQS | PKLLIYW | EAKVQ |
| | SGITIS | PAPEAAGAPSVELE | | KGRFTISR | | GVPSRFS | ASTRESG | WKVDN |
| | GGSTYY | PPKPKDTLMISRTP | | DNSKNTLY | | GSGSGTD | VPDRFSG | ALQSG |
| | ADSVKG | EVTCVVVDVSHEDP | | LQMNSLRA | | FTLTISS | SGSGTDF | NSQES |
| | RFTISR | EVKFNWYVDGVEVH | | EDTAVYYC | | LQPEDFA | TLTISSL | VTEQD |
| | DNSKNT | NAKTKPREEQYNST | | ARDRPYYY | | TYYCQQY | QAEDVAV | SKDST |
| | LYLQMN | YRVVSVLTVLHQDW | | YMDVWGKG | | KSYPVTF | YYCQQYY | YSLSS |
| | SLRAED | LNGKEYKCKVSNKA | | TTVTVSS | | GQGTKVE | TTPPTFG | TLTLS |
| | TAVYYC | LPAPIEKTISKAKG | | (SEQ ID | | IK (SEQ | QGTRLEI | KADYE |
| | ARGRGG | QPREPQVYTLPPSR | | NO: 591) | | ID NO: | K (SEQ | KHKVY |
| | SGWLDY | EEMTKNQVSLTCLV | | | | 592) | ID NO: | ACEVT |
| | WGQGTL | KGFYPSDIAVEWES | | | | | 1359) | HQGLS |
| | VTVSS | NGQPENNYKTTPPV | | | | | | SPVTK |
| | (SEQ | LDSDGSFFLYSKLT | | | | | | SFNRG |
| | ID NO: | VDKSRWQQGNVFSC | | | | | | EC |
| | 1608) | SVMHEALHNHYTQK | | | | | | (SEQ |
| | | SLSLSPG (SEQ | | | | | | ID |
| | | ID NO: 44) | | | | | | NO: |
| | | | | | | | | 45) |
| PMAB136 | EVQLLE | ASTKGPSVFPLAPS | GGGGSG | EVQLLESG | GGGGSG | DIQMTQS | DIVMTQS | RTVAA |
| | SGGGLV | SKSTSGGTAALGCL | GGGSGG | GGLVQPGG | GGGSGG | PSSLSAS | PDSLAVS | PSVFI |
| | QPGGSL | VKDYFPEPVTVSWN | GGS | SLRLSCAA | GGSGGG | VGDRVTI | LGERATI | FPPSD |
| | RLSCAA | SGALTSGVHTFPAV | (SEQ | SGFTFSDF | GS | TCRASQS | NCKSSQS | EQLKS |
| | SGFTFS | LQSSGLYSLSSVVT | ID NO: | WMHWVRQA | (SEQ | VSRSLAW | VLYSPNN | GTASV |
| | NYDMSW | VPSSSLGTQTYICN | 30) | PGKGLEWI | ID NO: | YQQKPGK | KNYLAWY | VCLLN |
| | VRQAPG | VNHKPSNTKVDKKV | | SYISGDSG | 22) | APKLLIY | QQKPGQP | NFYPR |
| | KGLEWV | EPKSCDKTHTCPPC | | YTNYADSV | | AASSLQS | PKLLIYW | EAKVQ |
| | SGITIS | PAPEAAGAPSVELE | | KGRFTISR | | GVPSRFS | ASTRESG | WKVDN |
| | GGSTYY | PPKPKDTLMISRTP | | DNSKNTLY | | GSGSGTD | VPDRFSG | ALQSG |
| | ADSVKG | EVTCVVVDVSHEDP | | LQMNSLRA | | FTLTISS | SGSGTDF | NSQES |
| | RFTISR | EVKFNWYVDGVEVH | | EDTAVYYC | | LQPEDFA | TLTISSL | VTEQD |
| | DNSKNT | NAKTKPREEQYNST | | ARDRPYYY | | TYYCQQY | QAEDVAV | SKDST |
| | LYLQMN | YRVVSVLTVLHQDW | | YMDVWGKG | | KSYPVTF | YYCQQYY | YSLSS |
| | SLRAED | LNGKEYKCKVSNKA | | TTVTVSS | | GQGTKVE | TTPPTFG | TLTLS |
| | TAVYYC | LPAPIEKTISKAKG | | (SEQ ID | | IK (SEQ | QGTRLEI | KADYE |
| | ARGRGG | QPREPQVYTLPPSR | | NO: 591) | | ID NO: | K (SEQ | KHKVY |
| | SGWLDY | EEMTKNQVSLTCLV | | | | 592) | ID NO: | ACEVT |
| | WGQGTL | KGFYPSDIAVEWES | | | | | 1359) | HQGLS |
| | VTVSS | NGQPENNYKTTPPV | | | | | | SPVTK |
| | (SEQ | LDSDGSFFLYSKLT | | | | | | SFNRG |
| | ID NO: | VDKSRWQQGNVFSC | | | | | | EC |
| | 1609) | SVMHEALHNHYTQK | | | | | | (SEQ |
| | | SLSLSPG (SEQ | | | | | | ID |
| | | ID NO: 44) | | | | | | NO: |
| | | | | | | | | 45) |
| PMAB137 | EVQLLE | ASTKGPSVFPLAPS | GGGGSG | EVQLLESG | GGGGSG | DIQMTQS | DIVMTQS | RTVAA |
| | SGGGLV | SKSTSGGTAALGCL | GGGSGG | GGLVQPGG | GGGSGG | PSSLSAS | PDSLAVS | PSVFI |
| | QPGGSL | VKDYFPEPVTVSWN | GGS | SLRLSCAA | GGSGGG | VGDRVTI | LGERATI | FPPSD |
| | RLSCAA | SGALTSGVHTFPAV | (SEQ | SGFTFSDF | GS | TCRASQS | NCKSSQS | EQLKS |
| | SGFTFS | LQSSGLYSLSSVVT | ID NO: | WMHWVRQA | (SEQ | VSRSLAW | VLYSPNN | GTASV |
| | NSAMSW | VPSSSLGTQTYICN | 30) | PGKGLEWI | ID NO: | YQQKPGK | KNYLAWY | VCLLN |
| | VRQAPG | VNHKPSNTKVDKKV | | SYISGDSG | 22) | APKLLIY | QQKPGQP | NFYPR |
| | KGLEWV | EPKSCDKTHTCPPC | | YTNYADSV | | AASSLQS | PKLLIYW | EAKVQ |
| | SGITIS | PAPEAAGAPSVELE | | KGRFTISR | | GVPSRFS | ASTRESG | WKVDN |
| | GGSTYY | PPKPKDTLMISRTP | | DNSKNTLY | | GSGSGTD | VPDRFSG | ALQSG |
| | ADSVKG | EVTCVVVDVSHEDP | | LQMNSLRA | | FTLTISS | SGSGTDF | NSQES |
| | RFTISR | EVKFNWYVDGVEVH | | EDTAVYYC | | LQPEDFA | TLTISSL | VTEQD |
| | DNSKNT | NAKTKPREEQYNST | | ARDRPYYY | | TYYCQQY | QAEDVAV | SKDST |
| | LYLQMN | YRVVSVLTVLHQDW | | YMDVWGKG | | KSYPVTF | YYCQQYY | YSLSS |
| | SLRAED | LNGKEYKCKVSNKA | | TTVTVSS | | GQGTKVE | TTPPTFG | TLTLS |
| | TAVYYC | LPAPIEKTISKAKG | | (SEQ ID | | IK (SEQ | QGTRLEI | KADYE |
| | ARGRGG | QPREPQVYTLPPSR | | NO: 591) | | ID NO: | K (SEQ | KHKVY |
| | SGWLDY | EEMTKNQVSLTCLV | | | | 592) | ID NO: | ACEVT |
| | WGQGTL | KGFYPSDIAVEWES | | | | | 1359) | HQGLS |
| | VTVSS | NGQPENNYKTTPPV | | | | | | SPVTK |
| | (SEQ | LDSDGSFFLYSKLT | | | | | | SFNRG |
| | ID NO: | VDKSRWQQGNVFSC | | | | | | EC |
| | 1574) | SVMHEALHNHYTQK | | | | | | (SEQ |
| | | SLSLSPG (SEQ | | | | | | ID |
| | | ID NO: 44) | | | | | | NO: |
| | | | | | | | | 45) |
| PMAB138 | EVQLLE | ASTKGPSVFPLAPS | GGGGSG | EVQLLESG | GGGGSG | DIQMTQS | DIVMTQS | RTVAA |
| | SGGGLV | SKSTSGGTAALGCL | GGGSGG | GGLVQPGG | GGGSGG | PSSLSAS | PDSLAVS | PSVFI |
| | QPGGSL | VKDYFPEPVTVSWN | GGS | SLRLSCAA | GGSGGG | VGDRVTI | LGERATI | FPPSD |
| | RLSCAA | SGALTSGVHTFPAV | (SEQ | SGFTFSDF | GS | TCRASQS | NCKSSQS | EQLKS |
| | SGFTFS | LQSSGLYSLSSVVT | ID NO: | WMHWVRQA | (SEQ | VSRSLAW | VLYSPNN | GTASV |
| | NSDMSW | VPSSSLGTQTYICN | 30) | PGKGLEWI | ID NO: | YQQKPGK | KNYLAWY | VCLLN |
| | VRQAPG | VNHKPSNTKVDKKV | | SYISGDSG | 22) | APKLLIY | QQKPGQP | NFYPR |
| | KGLEWV | EPKSCDKTHTCPPC | | YTNYADSV | | AASSLQS | PKLLIYW | EAKVQ |
| | SAITIS | PAPEAAGAPSVELE | | KGRFTISR | | GVPSRFS | ASTRESG | WKVDN |
| | GGSTYY | PPKPKDTLMISRTP | | DNSKNTLY | | GSGSGTD | VPDRFSG | ALQSG |
| | ADSVKG | EVTCVVVDVSHEDP | | LQMNSLRA | | FTLTISS | SGSGTDF | NSQES |
| | RFTISR | EVKFNWYVDGVEVH | | EDTAVYYC | | LQPEDFA | TLTISSL | VTEQD |
| | DNSKNT | NAKTKPREEQYNST | | ARDRPYYY | | TYYCQQY | QAEDVAV | SKDST |
| | LYLQMN | YRVVSVLTVLHQDW | | YMDVWGKG | | KSYPVTF | YYCQQYY | YSLSS |
| | SLRAED | LNGKEYKCKVSNKA | | TTVTVSS | | GQGTKVE | TTPPTFG | TLTLS |
| | TAVYYC | LPAPIEKTISKAKG | | (SEQ ID | | IK (SEQ | QGTRLEI | KADYE |
| | ARGRGG | QPREPQVYTLPPSR | | NO: 591) | | ID NO: | K (SEQ | KHKVY |
| | SGWLDY | EEMTKNQVSLTCLV | | | | 592) | ID NO: | ACEVT |
| | WGQGTL | KGFYPSDIAVEWES | | | | | 1359) | HQGLS |
| | VTVSS | NGQPENNYKTTPPV | | | | | | SPVTK |
| | (SEQ | LDSDGSFFLYSKLT | | | | | | SFNRG |
| | ID NO: | VDKSRWQQGNVFSC | | | | | | EC |
| | 1610) | SVMHEALHNHYTQK | | | | | | (SEQ |
| | | SLSLSPG (SEQ | | | | | | ID |
| | | ID NO: 44) | | | | | | NO: |
| | | | | | | | | 45) |
| PMAB139 | EVQLLE | ASTKGPSVFPLAPS | GGGGSG | EVQLLESG | GGGGSG | DIQMTQS | DIVMTQS | RTVAA |
| | SGGGLV | SKSTSGGTAALGCL | GGGSGG | GGLVQPGG | GGGSGG | PSSLSAS | PDSLAVS | PSVFI |
| | QPGGSL | VKDYFPEPVTVSWN | GGS | SLRLSCAA | GGSGGG | VGDRVTI | LGERATI | FPPSD |
| | RLSCAA | SGALTSGVHTFPAV | (SEQ | SGFTFSDF | GS | TCRASQS | NCKSSQS | EQLKS |
| | SGFTFS | LQSSGLYSLSSVVT | ID NO: | WMHWVRQA | (SEQ | VSRSLAW | VLYSPNN | GTASV |
| | NSDMSW | VPSSSLGTQTYICN | 30) | PGKGLEWI | ID NO: | YQQKPGK | KNYLAWY | VCLLN |
| | VRQAPG | VNHKPSNTKVDKKV | | SYISGDSG | 22) | APKLLIY | QQKPGQP | NFYPR |
| | KGLEWV | EPKSCDKTHTCPPC | | YTNYADSV | | AASSLQS | PKLLIYW | EAKVQ |
| | SGISIS | PAPEAAGAPSVELE | | KGRFTISR | | GVPSRFS | ASTRESG | WKVDN |
| | GGSTYY | PPKPKDTLMISRTP | | DNSKNTLY | | GSGSGTD | VPDRFSG | ALQSG |
| | ADSVKG | EVTCVVVDVSHEDP | | LQMNSLRA | | FTLTISS | SGSGTDF | NSQES |
| | RFTISR | EVKFNWYVDGVEVH | | EDTAVYYC | | LQPEDFA | TLTISSL | VTEQD |
| | DNSKNT | NAKTKPREEQYNST | | ARDRPYYY | | TYYCQQY | QAEDVAV | SKDST |
| | LYLQMN | YRVVSVLTVLHQDW | | YMDVWGKG | | KSYPVTF | YYCQQYY | YSLSS |
| | SLRAED | LNGKEYKCKVSNKA | | TTVTVSS | | GQGTKVE | TTPPTFG | TLTLS |
| | TAVYYC | LPAPIEKTISKAKG | | (SEQ ID | | IK (SEQ | QGTRLEI | KADYE |
| | ARGRGG | QPREPQVYTLPPSR | | NO: 591) | | ID NO: | K (SEQ | KHKVY |
| | SGWLDY | EEMTKNQVSLTCLV | | | | 592) | ID NO: | ACEVT |
| | WGQGTL | KGFYPSDIAVEWES | | | | | 1359) | HQGLS |
| | VTVSS | NGQPENNYKTTPPV | | | | | | SPVTK |
| | (SEQ | LDSDGSFFLYSKLT | | | | | | SFNRG |
| | ID NO: | VDKSRWQQGNVFSC | | | | | | EC |
| | 1611) | SVMHEALHNHYTQK | | | | | | (SEQ |
| | | SLSLSPG (SEQ | | | | | | ID |
| | | ID NO: 44) | | | | | | NO: |
| | | | | | | | | 45) |
| PMAB140 | EVQLLE | ASTKGPSVFPLAPS | GGGGSG | EVQLLESG | GGGGSG | DIQMTQS | DIVMTQS | RTVAA |
| | SGGGLV | SKSTSGGTAALGCL | GGGSGG | GGLVQPGG | GGGSGG | PSSLSAS | PDSLAVS | PSVFI |
| | QPGGSL | VKDYFPEPVTVSWN | GGS | SLRLSCAA | GGSGGG | VGDRVTI | LGERATI | FPPSD |
| | RLSCAA | SGALTSGVHTFPAV | (SEQ | SGFTFSDF | GS | TCRASQS | NCKSSQS | EQLKS |
| | SGFTFS | LQSSGLYSLSSVVT | ID NO: | WMHWVRQA | (SEQ | VSRSLAW | VLYSPNN | GTASV |
| | NSDMSW | VPSSSLGTQTYICN | 30) | PGKGLEWI | ID NO: | YQQKPGK | KNYLAWY | VCLLN |
| | VRQAPG | VNHKPSNTKVDKKV | | SYISGDSG | 22) | APKLLIY | QQKPGQP | NFYPR |
| | KGLEWV | EPKSCDKTHTCPPC | | YTNYADSV | | AASSLQS | PKLLIYW | EAKVQ |
| | SGITGS | PAPEAAGAPSVELE | | KGRFTISR | | GVPSRFS | ASTRESG | WKVDN |
| | GGSTYY | PPKPKDTLMISRTP | | DNSKNTLY | | GSGSGTD | VPDRFSG | ALQSG |
| | ADSVKG | EVTCVVVDVSHEDP | | LQMNSLRA | | FTLTISS | SGSGTDF | NSQES |
| | RFTISR | EVKFNWYVDGVEVH | | EDTAVYYC | | LQPEDFA | TLTISSL | VTEQD |
| | DNSKNT | NAKTKPREEQYNST | | ARDRPYYY | | TYYCQQY | QAEDVAV | SKDST |
| | LYLQMN | YRVVSVLTVLHQDW | | YMDVWGKG | | KSYPVTF | YYCQQYY | YSLSS |
| | SLRAED | LNGKEYKCKVSNKA | | TTVTVSS | | GQGTKVE | TTPPTFG | TLTLS |
| | TAVYYC | LPAPIEKTISKAKG | | (SEQ ID | | IK (SEQ | QGTRLEI | KADYE |
| | ARGRGG | QPREPQVYTLPPSR | | NO: 591) | | ID NO: | K (SEQ | KHKVY |
| | SGWLDY | EEMTKNQVSLTCLV | | | | 592) | ID NO: | ACEVT |
| | WGQGTL | KGFYPSDIAVEWES | | | | | 1359) | HQGLS |
| | VTVSS | NGQPENNYKTTPPV | | | | | | SPVTK |
| | (SEQ | LDSDGSFFLYSKLT | | | | | | SFNRG |
| | ID NO: | VDKSRWQQGNVFSC | | | | | | EC |
| | 1612) | SVMHEALHNHYTQK | | | | | | (SEQ |
| | | SLSLSPG (SEQ | | | | | | ID |
| | | ID NO: 44) | | | | | | NO: |
| | | | | | | | | 45) |
| PMAB141 | EVQLLE | ASTKGPSVFPLAPS | GGGGSG | EVQLLESG | GGGGSG | DIQMTQS | DIVMTQS | RTVAA |
| | SGGGLV | SKSTSGGTAALGCL | GGGSGG | GGLVQPGG | GGGSGG | PSSLSAS | PDSLAVS | PSVFI |
| | QPGGSL | VKDYFPEPVTVSWN | GGS | SLRLSCAA | GGSGGG | VGDRVTI | LGERATI | FPPSD |
| | RLSCAA | SGALTSGVHTFPAV | (SEQ | SGFTFSDF | GS | TCRASQS | NCKSSQS | EQLKS |
| | SGFTFS | LQSSGLYSLSSVVT | ID NO: | WMHWVRQA | (SEQ | VSRSLAW | VLYSPNN | GTASV |
| | SYAMSW | VPSSSLGTQTYICN | 30) | PGKGLEWI | ID NO: | YQQKPGK | KNYLAWY | VCLLN |
| | VRQAPG | VNHKPSNTKVDKKV | | SYISGDSG | 22) | APKLLIY | QQKPGQP | NFYPR |
| | KGLEWV | EPKSCDKTHTCPPC | | YTNYADSV | | AASSLQS | PKLLIYW | EAKVQ |
| | SAISGS | PAPEAAGAPSVELE | | KGRFTISR | | GVPSRFS | ASTRESG | WKVDN |
| | GGSTYY | PPKPKDTLMISRTP | | DNSKNTLY | | GSGSGTD | VPDRFSG | ALQSG |
| | ADSVKG | EVTCVVVDVSHEDP | | LQMNSLRA | | FTLTISS | SGSGTDF | NSQES |
| | RFTISR | EVKFNWYVDGVEVH | | EDTAVYYC | | LQPEDFA | TLTISSL | VTEQD |
| | DNSKNT | NAKTKPREEQYNST | | ARDRPYYY | | TYYCQQY | QAEDVAV | SKDST |
| | LYLQMN | YRVVSVLTVLHQDW | | YMDVWGKG | | KSYPVTF | YYCQQYY | YSLSS |
| | SLRAED | LNGKEYKCKVSNKA | | TTVTVSS | | GQGTKVE | TTPPTFG | TLTLS |
| | TAVYYC | LPAPIEKTISKAKG | | (SEQ ID | | IK (SEQ | QGTRLEI | KADYE |
| | ARGRGG | QPREPQVYTLPPSR | | NO: 591) | | ID NO: | K (SEQ | KHKVY |
| | SGWLDY | EEMTKNQVSLTCLV | | | | 592) | ID NO: | ACEVT |
| | WGQGTL | KGFYPSDIAVEWES | | | | | 1359) | HQGLS |
| | VTVSS | NGQPENNYKTTPPV | | | | | | SPVTK |
| | (SEQ | LDSDGSFFLYSKLT | | | | | | SFNRG |
| | ID NO: | VDKSRWQQGNVFSC | | | | | | EC |
| | 1613) | SVMHEALHNHYTQK | | | | | | (SEQ |
| | | SLSLSPG (SEQ | | | | | | ID |
| | | ID NO: 44) | | | | | | NO: |
| | | | | | | | | 45) |
| PMAB142 | EVQLLE | ASTKGPSVFPLAPS | GGGGSG | EVQLLESG | GGGGSG | DIQMTQS | DIVMTQS | RTVAA |
| | SGGGLV | SKSTSGGTAALGCL | GGGSGG | GGLVQPGG | GGGSGG | PSSLSAS | PDSLAVS | PSVFI |
| | QPGGSL | VKDYFPEPVTVSWN | GGS | SLRLSCAA | GGSGGG | VGDRVTI | LGERATI | FPPSD |
| | RLSCAA | SGALTSGVHTFPAV | (SEQ | SGFTFSDF | GS | TCRASQS | NCKSSQS | EQLKS |
| | SGFTFS | LQSSGLYSLSSVVT | ID NO: | WMHWVRQA | (SEQ | VSRSLAW | VLYSSNN | GTASV |
| | NSDMSW | VPSSSLGTQTYICN | 30) | PGKGLEWI | ID NO: | YQQKPGK | KNYLAWY | VCLLN |
| | VRQAPG | VNHKPSNTKVDKKV | | SYISGDSG | 22) | APKLLIY | QQKPGQP | NFYPR |
| | KGLEWV | EPKSCDKTHTCPPC | | YTNYADSV | | AASSLQS | PKLLIYW | EAKVQ |
| | SGITIS | PAPEAAGAPSVELE | | KGRFTISR | | GVPSRFS | ASTRESG | WKVDN |
| | GGSTYY | PPKPKDTLMISRTP | | DNSKNTLY | | GSGSGTD | VPDRFSG | ALQSG |
| | ADSVKG | EVTCVVVDVSHEDP | | LQMNSLRA | | FTLTISS | SGSGTDF | NSQES |
| | RFTISR | EVKFNWYVDGVEVH | | EDTAVYYC | | LQPEDFA | TLTISSL | VTEQD |
| | DNSKNT | NAKTKPREEQYNST | | ARDRPYYY | | TYYCQQY | QAEDVAV | SKDST |
| | LYLQMN | YRVVSVLTVLHQDW | | YMDVWGKG | | KSYPVTF | YYCQQYY | YSLSS |
| | SLRAED | LNGKEYKCKVSNKA | | TTVTVSS | | GQGTKVE | TTPPTFG | TLTLS |
| | TAVYYC | LPAPIEKTISKAKG | | (SEQ ID | | IK (SEQ | QGTRLEI | KADYE |
| | ARGRGG | QPREPQVYTLPPSR | | NO: 591) | | ID NO: | K (SEQ | KHKVY |
| | SGWLDY | EEMTKNQVSLTCLV | | | | 592) | ID NO: | ACEVT |
| | WGQGTL | KGFYPSDIAVEWES | | | | | 1614) | HQGLS |
| | VTVSS | NGQPENNYKTTPPV | | | | | | SPVTK |
| | (SEQ | LDSDGSFFLYSKLT | | | | | | SFNRG |
| | ID NO: | VDKSRWQQGNVFSC | | | | | | EC |
| | 1438) | SVMHEALHNHYTQK | | | | | | (SEQ |
| | | SLSLSPG (SEQ | | | | | | ID |
| | | ID NO: 44) | | | | | | NO: |
| | | | | | | | | 45) |
| PMAB143 | EVQLLE | ASTKGPSVFPLAPS | GGGGSG | EVQLLESG | GGGGSG | DIQMTQS | DIVMTQS | RTVAA |
| | SGGGLV | SKSTSGGTAALGCL | GGGSGG | GGLVQPGG | GGGSGG | PSSLSAS | PDSLAVS | PSVFI |
| | QPGGSL | VKDYFPEPVTVSWN | GGS | SLRLSCAA | GGSGGG | VGDRVTI | LGERATI | FPPSD |
| | RLSCAA | SGALTSGVHTFPAV | (SEQ | SGFTFSDF | GS | TCRASQS | NCKSSQS | EQLKS |
| | SGFTFS | LQSSGLYSLSSVVT | ID NO: | WMHWVRQA | (SEQ | VSRSLAW | VLYSPNN | GTASV |
| | NSDMSW | VPSSSLGTQTYICN | 30) | PGKGLEWI | ID NO: | YQQKPGK | KNYLAWY | VCLLN |
| | VRQAPG | VNHKPSNTKVDKKV | | SYISGDSG | 22) | APKLLIY | QQKPGQP | NFYPR |
| | KGLEWV | EPKSCDKTHTCPPC | | YTNYADSV | | AASSLQS | PKLLIYW | EAKVQ |
| | SGITIS | PAPEAAGAPSVELE | | KGRFTISR | | GVPSRFS | ASTRESG | WKVDN |
| | GGSTYY | PPKPKDTLMISRTP | | DNSKNTLY | | GSGSGTD | VPDRFSG | ALQSG |
| | ADSVKG | EVTCVVVDVSHEDP | | LQMNSLRA | | FTLTISS | SGSGTDF | NSQES |
| | RFTISR | EVKFNWYVDGVEVH | | EDTAVYYC | | LQPEDFA | TLTISSL | VTEQD |
| | DNSKNT | NAKTKPREEQYNST | | ARDRPYYY | | TYYCQQY | QAEDVAV | SKDST |
| | LYLQMN | YRVVSVLTVLHQDW | | YMDVWGKG | | KSYPVTF | YYCQQYY | YSLSS |
| | SLRAED | LNGKEYKCKVSNKA | | TTVTVSS | | GQGTKVE | STPPTFG | TLTLS |
| | TAVYYC | LPAPIEKTISKAKG | | (SEQ ID | | IK (SEQ | QGTRLEI | KADYE |
| | ARGRGG | QPREPQVYTLPPSR | | NO: 591) | | ID NO: | K (SEQ | KHKVY |
| | SGWLDY | EEMTKNQVSLTCLV | | | | 592) | ID NO: | ACEVT |
| | WGQGTL | KGFYPSDIAVEWES | | | | | 1615) | HQGLS |
| | VTVSS | NGQPENNYKTTPPV | | | | | | SPVTK |
| | (SEQ | LDSDGSFFLYSKLT | | | | | | SFNRG |
| | ID NO: | VDKSRWQQGNVFSC | | | | | | EC |
| | 1438) | SVMHEALHNHYTQK | | | | | | (SEQ |
| | | SLSLSPG (SEQ | | | | | | ID |
| | | ID NO: 44) | | | | | | NO: |
| | | | | | | | | 45) |
| PMAB144 | EVQLLE | ASTKGPSVFPLAPS | GGGGSG | EVQLLESG | GGGGSG | DIQMTQS | DIVMTQS | RTVAA |
| | SGGGLV | SKSTSGGTAALGCL | GGGSGG | GGLVQPGG | GGGSGG | PSSLSAS | PDSLAVS | PSVFI |
| | QPGGSL | VKDYFPEPVTVSWN | GGS | SLRLSCAA | GGSGGG | VGDRVTI | LGERATI | FPPSD |
| | RLSCAA | SGALTSGVHTFPAV | (SEQ | SGFTFSDF | GS | TCRASQS | NCKSSQS | EQLKS |
| | SGFTFS | LQSSGLYSLSSVVT | ID NO: | WMHWVRQA | (SEQ | VSRSLAW | VLYSPNN | GTASV |
| | NSDMSW | VPSSSLGTQTYICN | 30) | PGKGLEWI | ID NO: | YQQKPGK | KNYLAWY | VCLLN |
| | VRQAPG | VNHKPSNTKVDKKV | | SYISGDSG | 22) | APKLLIY | QQKPGQP | NFYPR |
| | KGLEWV | EPKSCDKTHTCPPC | | YTNYADSV | | AASSLQS | PKLLIYW | EAKVQ |
| | SGITIS | PAPEAAGAPSVELE | | KGRFTISR | | GVPSRFS | ASTRESG | WKVDN |
| | GGSTYY | PPKPKDTLMISRTP | | DNSKNTLY | | GSGSGTD | VPDRFSG | ALQSG |
| | ADSVKG | EVTCVVVDVSHEDP | | LQMNSLRA | | FTLTISS | SGSGTDF | NSQES |
| | RFTISR | EVKFNWYVDGVEVH | | EDTAVYYC | | LQPEDFA | TLTISSL | VTEQD |
| | DNSKNT | NAKTKPREEQYNST | | ARDRPYYY | | TYYCQQY | QAEDVAV | SKDST |
| | LYLQMN | YRVVSVLTVLHQDW | | YMDVWGKG | | KSYPVTF | YYCQQYY | YSLSS |
| | SLRAED | LNGKEYKCKVSNKA | | TTVTVSS | | GQGTKVE | TTPLTFG | TLTLS |
| | TAVYYC | LPAPIEKTISKAKG | | (SEQ ID | | IK (SEQ | QGTRLEI | KADYE |
| | ARGRGG | QPREPQVYTLPPSR | | NO: 591) | | ID NO: | K (SEQ | KHKVY |
| | SGWLDY | EEMTKNQVSLTCLV | | | | 592) | ID NO: | ACEVT |
| | WGQGTL | KGFYPSDIAVEWES | | | | | 1616) | HQGLS |
| | VTVSS | NGQPENNYKTTPPV | | | | | | SPVTK |
| | (SEQ | LDSDGSFFLYSKLT | | | | | | SFNRG |
| | ID NO: | VDKSRWQQGNVFSC | | | | | | EC |
| | 1438) | SVMHEALHNHYTQK | | | | | | (SEQ |
| | | SLSLSPG (SEQ | | | | | | ID |
| | | ID NO: 44) | | | | | | NO: |
| | | | | | | | | 45) |
| PMAB145 | EVQLLE | ASTKGPSVFPLAPS | GGGGSG | EVQLLESG | GGGGSG | DIQMTQS | DIVMTQS | RTVAA |
| | SGGGLV | SKSTSGGTAALGCL | GGGSGG | GGLVQPGG | GGGSGG | PSSLSAS | PDSLAVS | PSVFI |
| | QPGGSL | VKDYFPEPVTVSWN | GGS | SLRLSCAA | GGSGGG | VGDRVTI | LGERATI | FPPSD |
| | RLSCAA | SGALTSGVHTFPAV | (SEQ | SGFTFSDF | GS | TCRASQS | NCKSSQS | EQLKS |
| | SGFTFS | LQSSGLYSLSSVVT | ID NO: | WMHWVRQA | (SEQ | VSRSLAW | VLYSSNN | GTASV |
| | NSDMSW | VPSSSLGTQTYICN | 30) | PGKGLEWI | ID NO: | YQQKPGK | KNYLAWY | VCLLN |
| | VRQAPG | VNHKPSNTKVDKKV | | SYISGDSG | 22) | APKLLIY | QQKPGQP | NFYPR |
| | KGLEWV | EPKSCDKTHTCPPC | | YTNYADSV | | AASSLQS | PKLLIYW | EAKVQ |
| | SGITIS | PAPEAAGAPSVELE | | KGRFTISR | | GVPSRFS | ASTRESG | WKVDN |
| | GGSTYY | PPKPKDTLMISRTP | | DNSKNTLY | | GSGSGTD | VPDRFSG | ALQSG |
| | ADSVKG | EVTCVVVDVSHEDP | | LQMNSLRA | | FTLTISS | SGSGTDF | NSQES |
| | RFTISR | EVKFNWYVDGVEVH | | EDTAVYYC | | LQPEDFA | TLTISSL | VTEQD |
| | DNSKNT | NAKTKPREEQYNST | | ARDRPYYY | | TYYCQQY | QAEDVAV | SKDST |
| | LYLQMN | YRVVSVLTVLHQDW | | YMDVWGKG | | KSYPVTF | YYCQQYY | YSLSS |
| | SLRAED | LNGKEYKCKVSNKA | | TTVTVSS | | GQGTKVE | STPLTFG | TLTLS |
| | TAVYYC | LPAPIEKTISKAKG | | (SEQ ID | | IK (SEQ | QGTRLEI | KADYE |
| | ARGRGG | QPREPQVYTLPPSR | | NO: 591) | | ID NO: | K (SEQ | KHKVY |
| | SGWLDY | EEMTKNQVSLTCLV | | | | 592) | ID NO: | ACEVT |
| | WGQGTL | KGFYPSDIAVEWES | | | | | 1617) | HQGLS |
| | VTVSS | NGQPENNYKTTPPV | | | | | | SPVTK |
| | (SEQ | LDSDGSFFLYSKLT | | | | | | SFNRG |
| | ID NO: | VDKSRWQQGNVFSC | | | | | | EC |
| | 1438) | SVMHEALHNHYTQK | | | | | | (SEQ |
| | | SLSLSPG (SEQ | | | | | | ID |
| | | ID NO: 44) | | | | | | NO: |
| | | | | | | | | 45) |
| PMAB146 | EVQLLE | ASTKGPSVFPLAPS | GGGGSG | EVQLLESG | GGGGSG | DIQMTQS | DIVMTQS | RTVAA |
| | SGGGLV | SKSTSGGTAALGCL | GGGSGG | GGLVQPGG | GGGSGG | PSSLSAS | PDSLAVS | PSVFI |
| | QPGGSL | VKDYFPEPVTVSWN | GGS | SLRLSCAA | GGSGGG | VGDRVTI | LGERATI | FPPSD |
| | RLSCAA | SGALTSGVHTFPAV | (SEQ | SGFTFSDF | GS | TCRASQS | NCKSSQS | EQLKS |
| | SGFTFS | LQSSGLYSLSSVVT | ID NO: | WMHWVRQA | (SEQ | VSRSLAW | VLYSPNN | GTASV |
| | NSDMSW | VPSSSLGTQTYICN | 30) | PGKGLEWI | ID NO: | YQQKPGK | KNYLAWY | VCLLN |
| | VRQAPG | VNHKPSNTKVDKKV | | SYISGDSG | 22) | APKLLIY | QQKPGQP | NFYPR |
| | KGLEWV | EPKSCDKTHTCPPC | | YTNYADSV | | AASSLQS | PKLLIYW | EAKVQ |
| | SGITIS | PAPEAAGAPSVELE | | KGRFTISR | | GVPSRFS | ASTRESG | WKVDN |
| | GGSTYY | PPKPKDTLMISRTP | | DNSKNTLY | | GSGSGTD | VPDRFSG | ALQSG |
| | ADSVKG | EVTCVVVDVSHEDP | | LQMNSLRA | | FTLTISS | SGSGTDF | NSQES |
| | RFTISR | EVKFNWYVDGVEVH | | EDTAVYYC | | LQPEDFA | TLTISSL | VTEQD |
| | DNSKNT | NAKTKPREEQYNST | | ARDRPYYY | | TYYCQQY | QAEDVAV | SKDST |
| | LYLQMN | YRVVSVLTVLHQDW | | YMDVWGKG | | KSYPVTF | YYCQQYY | YSLSS |
| | SLRAED | LNGKEYKCKVSNKA | | TTVTVSS | | GQGTKVE | TTPPTFG | TLTLS |
| | TAVYYC | LPAPIEKTISKAKG | | (SEQ ID | | IK (SEQ | QGTRLEI | KADYE |
| | ARGRGG | QPREPQVYTLPPSR | | NO: 591) | | ID NO: | K (SEQ | KHKVY |
| | SGWLDY | EEMTKNQVSLTCLV | | | | 592) | ID NO: | ACEVT |
| | WGQGTA | KGFYPSDIAVEWES | | | | | 1359) | HQGLS |
| | VTVSS | NGQPENNYKTTPPV | | | | | | SPVTK |
| | (SEQ | LDSDGSFFLYSKLT | | | | | | SFNRG |
| | ID NO: | VDKSRWQQGNVFSC | | | | | | EC |
| | 1618) | SVMHEALHNHYTQK | | | | | | (SEQ |
| | | SLSLSPG (SEQ | | | | | | ID |
| | | ID NO: 44) | | | | | | NO: |
| | | | | | | | | 45) |
| PMAB147 | EVQLLE | ASTKGPSVFPLAPS | GGGGSG | EVQLLESG | GGGGSG | DIQMTQS | DIVMTQS | RTVAA |
| | SGGGLV | SKSTSGGTAALGCL | GGGSGG | GGLVQPGG | GGGSGG | PSSLSAS | PDSLAVS | PSVFI |
| | QPGGSL | VKDYFPEPVTVSWN | GGS | SLRLSCAA | GGSGGG | VGDRVTI | LGERATI | FPPSD |
| | RLSCAA | SGALTSGVHTFPAV | (SEQ | SGFTFSDF | GS | TCRASQS | NCKSSQS | EQLKS |
| | SGETFS | LQSSGLYSLSSVVT | ID NO: | WMHWVRQA | (SEQ | VSRSLAW | VLYSPNN | GTASV |
| | NSDMSW | VPSSSLGTQTYICN | 30) | PGKGLEWI | ID NO: | YQQKPGK | KNYLAWY | VCLLN |
| | VRQAPG | VNHKPSNTKVDKKV | | SYISGDSG | 22) | APKLLIY | QQKPGQP | NFYPR |
| | KGLEWV | EPKSCDKTHTCPPC | | YTNYADSV | | AASSLQS | PKLLIYW | EAKVQ |
| | SGITIS | PAPEAAGAPSVELE | | KGRFTISR | | GVPSRFS | ASTRESG | WKVDN |
| | GGSTYY | PPKPKDTLMISRTP | | DNSKNTLY | | GSGSGTD | VPDRFSG | ALQSG |
| | ADSVKG | EVTCVVVDVSHEDP | | LQMNSLRA | | FTLTISS | SGSGTDF | NSQES |
| | RFTISR | EVKFNWYVDGVEVH | | EDTAVYYC | | LQPEDFA | TLTISSL | VTEQD |
| | DNSKNT | NAKTKPREEQYNST | | ARDRPYYY | | TYYCQQY | QAEDVAV | SKDST |
| | LYLQMN | YRVVSVLTVLHQDW | | YMDVWGKG | | KSYPVTF | YYCQQYY | YSLSS |
| | SLRAED | LNGKEYKCKVSNKA | | TTVTVSS | | GQGTKVE | TTPPTFG | TLTLS |
| | TAVYYC | LPAPIEKTISKAKG | | (SEQ ID | | IK (SEQ | QGTRLEI | KADYE |
| | ARGRGG | QPREPQVYTLPPSR | | NO: 591) | | ID NO: | K (SEQ | KHKVY |
| | SGWLDY | EEMTKNQVSLTCLV | | | | 592) | ID NO: | ACEVT |
| | WGQGTD | KGFYPSDIAVEWES | | | | | 1359) | HQGLS |
| | VTVSS | NGQPENNYKTTPPV | | | | | | SPVTK |
| | (SEQ | LDSDGSFFLYSKLT | | | | | | SFNRG |
| | ID NO: | VDKSRWQQGNVFSC | | | | | | EC |
| | 1619) | SVMHEALHNHYTQK | | | | | | (SEQ |
| | | SLSLSPG (SEQ | | | | | | ID |
| | | ID NO: 44) | | | | | | NO: |
| | | | | | | | | 45) |
| PMAB148 | EVQLLE | ASTKGPSVFPLAPS | GGGGSG | EVQLLESG | GGGGSG | DIQMTQS | DIVMTQS | RTVAA |
| | SGGGLV | SKSTSGGTAALGCL | GGGSGG | GGLVQPGG | GGGSGG | PSSLSAS | PDSLAVS | PSVFI |
| | QPGGSL | VKDYFPEPVTVSWN | GGS | SLRLSCAA | GGSGGG | VGDRVTI | LGERATI | FPPSD |
| | RLSCAA | SGALTSGVHTFPAV | (SEQ | SGFTFSDF | GS | TCRASQS | NCKSSQS | EQLKS |
| | SGFTFS | LQSSGLYSLSSVVT | ID NO: | WMHWVRQA | (SEQ | VSRSLAW | VLYSPNN | GTASV |
| | NSDMSW | VPSSSLGTQTYICN | 30) | PGKGLEWI | ID NO: | YQQKPGK | KNYLAWY | VCLLN |
| | VRQAPG | VNHKPSNTKVDKKV | | SYISGDSG | 22) | APKLLIY | QQKPGQP | NFYPR |
| | KGLEWV | EPKSCDKTHTCPPC | | YTNYADSV | | AASSLQS | PKLLIYW | EAKVQ |
| | SGITIS | PAPEAAGAPSVELE | | KGRFTISR | | GVPSRFS | ASTRESG | WKVDN |
| | GGSTYY | PPKPKDTLMISRTP | | DNSKNTLY | | GSGSGTD | VPDRFSG | ALQSG |
| | ADSVKG | EVTCVVVDVSHEDP | | LQMNSLRA | | FTLTISS | SGSGTDF | NSQES |
| | RFTISR | EVKFNWYVDGVEVH | | EDTAVYYC | | LQPEDFA | TLTISSL | VTEQD |
| | DNSKNT | NAKTKPREEQYNST | | ARDRPYYY | | TYYCQQY | QAEDVAV | SKDST |
| | LYLQMN | YRVVSVLTVLHQDW | | YMDVWGKG | | KSYPVTF | YYCQQYY | YSLSS |
| | SLRAED | LNGKEYKCKVSNKA | | TTVTVSS | | GQGTKVE | TTPPTFG | TLTLS |
| | TAVYYC | LPAPIEKTISKAKG | | (SEQ ID | | IK (SEQ | QGTRLEI | KADYE |
| | ARGRGG | QPREPQVYTLPPSR | | NO: 591) | | ID NO: | K (SEQ | KHKVY |
| | SGWLDY | EEMTKNQVSLTCLV | | | | 592) | ID NO: | ACEVT |
| | WGQGTS | KGFYPSDIAVEWES | | | | | 1359) | HQGLS |
| | VTVSS | NGQPENNYKTTPPV | | | | | | SPVTK |
| | (SEQ | LDSDGSFFLYSKLT | | | | | | SFNRG |
| | ID NO: | VDKSRWQQGNVFSC | | | | | | EC |
| | 1620) | SVMHEALHNHYTQK | | | | | | (SEQ |
| | | SLSLSPG (SEQ | | | | | | ID |
| | | ID NO: 44) | | | | | | NO: |
| | | | | | | | | 45) |
| PMAB149 | EVQLLE | ASTKGPSVFPLAPS | GGGGSG | EVQLLESG | GGGGSG | DIQMTQS | DIVMTQS | RTVAA |
| | SGGGLV | SKSTSGGTAALGCL | GGGSGG | GGLVQPGG | GGGSGG | PSSLSAS | PDSLAVS | PSVFI |
| | QPGGSL | VKDYFPEPVTVSWN | GGS | SLRLSCAA | GGSGGG | VGDRVTI | LGERATI | FPPSD |
| | RLSCAA | SGALTSGVHTFPAV | (SEQ | SGFTFSDF | GS | TCRASQS | NCKSSQS | EQLKS |
| | SGFTFS | LQSSGLYSLSSVVT | ID NO: | WMHWVRQA | (SEQ | VSRSLAW | VLYSPNN | GTASV |
| | NSDMSW | VPSSSLGTQTYICN | 30) | PGKGLEWI | ID NO: | YQQKPGK | KNYLAWY | VCLLN |
| | VRQAPG | VNHKPSNTKVDKKV | | SYISGDSG | 22) | APKLLIY | QQKPGQP | NFYPR |
| | KGLEWV | EPKSCDKTHTCPPC | | YTNYADSV | | AASSLQS | PKLLIYW | EAKVQ |
| | SGITIS | PAPEAAGAPSVELE | | KGRFTISR | | GVPSRFS | ASTRESG | WKVDN |
| | GGSTYY | PPKPKDTLMISRTP | | DNSKNTLY | | GSGSGTD | VPDRFSG | ALQSG |
| | ADSVKG | EVTCVVVDVSHEDP | | LQMNSLRA | | FTLTISS | SGSGTDF | NSQES |
| | RFTISR | EVKFNWYVDGVEVH | | EDTAVYYC | | LQPEDFA | TLTISSL | VTEQD |
| | DNSKNT | NAKTKPREEQYNST | | ARDRPYYY | | TYYCQQY | QAEDVAV | SKDST |
| | LYLQMN | YRVVSVLTVLHQDW | | YMDVWGKG | | KSYPVTF | YYCQQYY | YSLSS |
| | SLRAED | LNGKEYKCKVSNKA | | TTVTVSS | | GQGTKVE | TTPPTFG | TLTLS |
| | TAVYYC | LPAPIEKTISKAKG | | (SEQ ID | | IK (SEQ | QGTRLEI | KADYE |
| | ARGSGG | QPREPQVYTLPPSR | | NO: 591) | | ID NO: | K (SEQ | KHKVY |
| | SGWLDY | EEMTKNQVSLTCLV | | | | 592) | ID NO: | ACEVT |
| | WGQGTL | KGFYPSDIAVEWES | | | | | 1359) | HQGLS |
| | VTVSS | NGQPENNYKTTPPV | | | | | | SPVTK |
| | (SEQ | LDSDGSFFLYSKLT | | | | | | SFNRG |
| | ID NO: | VDKSRWQQGNVFSC | | | | | | EC |
| | 1621) | SVMHEALHNHYTQK | | | | | | (SEQ |
| | | SLSLSPG (SEQ | | | | | | ID |
| | | ID NO: 44) | | | | | | NO: |
| | | | | | | | | 45) |
| PMAB150 | EVQLLE | ASTKGPSVFPLAPS | GGGGSG | EVQLLESG | GGGGSG | DIQMTQS | DIVMTQS | RTVAA |
| | SGGGLV | SKSTSGGTAALGCL | GGGSGG | GGLVQPGG | GGGSGG | PSSLSAS | PDSLAVS | PSVFI |
| | QPGGSL | VKDYFPEPVTVSWN | GGS | SLRLSCAA | GGSGGG | VGDRVTI | LGERATI | FPPSD |
| | RLSCAA | SGALTSGVHTFPAV | (SEQ | SGFTFSDF | GS | TCRASQS | NCKSSQS | EQLKS |
| | SGFTFS | LQSSGLYSLSSVVT | ID NO: | WMHWVRQA | (SEQ | VSRSLAW | VLYSPNN | GTASV |
| | NSDMSW | VPSSSLGTQTYICN | 30) | PGKGLEWI | ID NO: | YQQKPGK | KNYLAWY | VCLLN |
| | VRQAPG | VNHKPSNTKVDKKV | | SYISGDSG | 22) | APKLLIY | QQKPGQP | NFYPR |
| | KGLEWV | EPKSCDKTHTCPPC | | YTNYADSV | | AASSLQS | PKLLIYW | EAKVQ |
| | SGITIS | PAPEAAGAPSVELE | | KGRFTISR | | GVPSRFS | ASTRESG | WKVDN |
| | GGSTYY | PPKPKDTLMISRTP | | DNSKNTLY | | GSGSGTD | VPDRFSG | ALQSG |
| | ADSVKG | EVTCVVVDVSHEDP | | LQMNSLRA | | FTLTISS | SGSGTDF | NSQES |
| | RFTISR | EVKFNWYVDGVEVH | | EDTAVYYC | | LQPEDFA | TLTISSL | VTEQD |
| | DNSKNT | NAKTKPREEQYNST | | ARDRPYYY | | TYYCQQY | QAEDVAV | SKDST |
| | LYLQMN | YRVVSVLTVLHQDW | | YMDVWGKG | | KSYPVTF | YYCQQYY | YSLSS |
| | SLRAED | LNGKEYKCKVSNKA | | TTVTVSS | | GQGTKVE | TTPPTFG | TLTLS |
| | TAVYYC | LPAPIEKTISKAKG | | (SEQ ID | | IK (SEQ | QGTRLEI | KADYE |
| | ARGTGG | QPREPQVYTLPPSR | | NO: 591) | | ID NO: | K (SEQ | KHKVY |
| | SGWLDY | EEMTKNQVSLTCLV | | | | 592) | ID NO: | ACEVT |
| | WGQGTL | KGFYPSDIAVEWES | | | | | 1359) | HQGLS |
| | VTVSS | NGQPENNYKTTPPV | | | | | | SPVTK |
| | (SEQ | LDSDGSFFLYSKLT | | | | | | SFNRG |
| | ID NO: | VDKSRWQQGNVFSC | | | | | | EC |
| | 1622) | SVMHEALHNHYTQK | | | | | | (SEQ |
| | | SLSLSPG (SEQ | | | | | | ID |
| | | ID NO: 44) | | | | | | NO: |
| | | | | | | | | 45) |
| PMAB151 | EVQLLE | ASTKGPSVFPLAPS | GGGGSG | EVQLLESG | GGGGSG | DIQMTQS | DIVMTQS | RTVAA |
| | SGGGLV | SKSTSGGTAALGCL | GGGSGG | GGLVQPGG | GGGSGG | PSSLSAS | PDSLAVS | PSVFI |
| | QPGGSL | VKDYFPEPVTVSWN | GGS | SLRLSCAA | GGSGGG | VGDRVTI | LGERATI | FPPSD |
| | RLSCAA | SGALTSGVHTFPAV | (SEQ | SGFTFSDF | GS | TCRASQS | NCKSSQS | EQLKS |
| | SGFTFS | LQSSGLYSLSSVVT | ID NO: | WMHWVRQA | (SEQ | VSRSLAW | VLYSPNN | GTASV |
| | NSDMSW | VPSSSLGTQTYICN | 30) | PGKGLEWI | ID NO: | YQQKPGK | KNYLAWY | VCLLN |
| | VRQAPG | VNHKPSNTKVDKKV | | SYISGDSG | 22) | APKLLIY | QQKPGQP | NFYPR |
| | KGLEWV | EPKSCDKTHTCPPC | | YTNYADSV | | AASSLQS | PKLLIYW | EAKVQ |
| | SGITIS | PAPEAAGAPSVELE | | KGRFTISR | | GVPSRFS | ASTRESG | WKVDN |
| | GGSTYY | PPKPKDTLMISRTP | | DNSKNTLY | | GSGSGTD | VPDRFSG | ALQSG |
| | ADSVKG | EVTCVVVDVSHEDP | | LQMNSLRA | | FTLTISS | SGSGTDF | NSQES |
| | RFTISR | EVKFNWYVDGVEVH | | EDTAVYYC | | LQPEDFA | TLTISSL | VTEQD |
| | DNSKNT | NAKTKPREEQYNST | | ARDRPYYY | | TYYCQQY | QAEDVAV | SKDST |
| | LYLQMN | YRVVSVLTVLHQDW | | YMDVWGKG | | KSYPVTF | YYCQQYY | YSLSS |
| | SLRAED | LNGKEYKCKVSNKA | | TTVTVSS | | GQGTKVE | TTPPTFG | TLTLS |
| | TAVYYC | LPAPIEKTISKAKG | | (SEQ ID | | IK (SEQ | QGTRLEI | KADYE |
| | ARGRGG | QPREPQVYTLPPSR | | NO: 591) | | ID NO: | K (SEQ | KHKVY |
| | SGALDY | EEMTKNQVSLTCLV | | | | 592) | ID NO: | ACEVT |
| | WGQGTL | KGFYPSDIAVEWES | | | | | 1359) | HQGLS |
| | VTVSS | NGQPENNYKTTPPV | | | | | | SPVTK |
| | (SEQ | LDSDGSFFLYSKLT | | | | | | SFNRG |
| | ID NO: | VDKSRWQQGNVFSC | | | | | | EC |
| | 1623) | SVMHEALHNHYTQK | | | | | | (SEQ |
| | | SLSLSPG (SEQ | | | | | | ID |
| | | ID NO: 44) | | | | | | NO: |
| | | | | | | | | 45) |
| PMAB152 | EVQLLE | ASTKGPSVFPLAPS | GGGGSG | EVQLLESG | GGGGSG | DIQMTQS | DIVMTQS | RTVAA |
| | SGGGLV | SKSTSGGTAALGCL | GGGSGG | GGLVQPGG | GGGSGG | PSSLSAS | PDSLAVS | PSVFI |
| | QPGGSL | VKDYFPEPVTVSWN | GGS | SLRLSCAA | GGSGGG | VGDRVTI | LGERATI | FPPSD |
| | RLSCAA | SGALTSGVHTFPAV | (SEQ | SGFTFSDF | GS | TCRASQS | NCKSSQS | EQLKS |
| | SGFTFS | LQSSGLYSLSSVVT | ID NO: | WMHWVRQA | (SEQ | VSRSLAW | VLYSPNN | GTASV |
| | NSDMSW | VPSSSLGTQTYICN | 30) | PGKGLEWI | ID NO: | YQQKPGK | KNYLAWY | VCLLN |
| | VRQAPG | VNHKPSNTKVDKKV | | SYISGDSG | 22) | APKLLIY | QQKPGQP | NFYPR |
| | KGLEWV | EPKSCDKTHTCPPC | | YTNYADSV | | AASSLQS | PKLLIYW | EAKVQ |
| | SGITIS | PAPEAAGAPSVELE | | KGRFTISR | | GVPSRFS | ASTRESG | WKVDN |
| | GGSTYY | PPKPKDTLMISRTP | | DNSKNTLY | | GSGSGTD | VPDRFSG | ALQSG |
| | ADSVKG | EVTCVVVDVSHEDP | | LQMNSLRA | | FTLTISS | SGSGTDF | NSQES |
| | RFTISR | EVKFNWYVDGVEVH | | EDTAVYYC | | LQPEDFA | TLTISSL | VTEQD |
| | DNSKNT | NAKTKPREEQYNST | | ARDRPYYY | | TYYCQQY | QAEDVAV | SKDST |
| | LYLQMN | YRVVSVLTVLHQDW | | YMDVWGKG | | KSYPVTF | YYCQQYY | YSLSS |
| | SLRAED | LNGKEYKCKVSNKA | | TTVTVSS | | GQGTKVE | TTPPTFG | TLTLS |
| | TAVYYC | LPAPIEKTISKAKG | | (SEQ ID | | IK (SEQ | QGTRLEI | KADYE |
| | ARGRGG | QPREPQVYTLPPSR | | NO: 591) | | ID NO: | K (SEQ | KHKVY |
| | SGDLDY | EEMTKNQVSLTCLV | | | | 592) | ID NO: | ACEVT |
| | WGQGTL | KGFYPSDIAVEWES | | | | | 1359) | HQGLS |
| | VTVSS | NGQPENNYKTTPPV | | | | | | SPVTK |
| | (SEQ | LDSDGSFFLYSKLT | | | | | | SFNRG |
| | ID NO: | VDKSRWQQGNVFSC | | | | | | EC |
| | 1624) | SVMHEALHNHYTQK | | | | | | (SEQ |
| | | SLSLSPG (SEQ | | | | | | ID |
| | | ID NO: 44) | | | | | | NO: |
| | | | | | | | | 45) |
| PMAB153 | EVQLLE | ASTKGPSVFPLAPS | GGGGSG | EVQLLESG | GGGGSG | DIQMTQS | DIVMTQS | RTVAA |
| | SGGGLV | SKSTSGGTAALGCL | GGGSGG | GGLVQPGG | GGGSGG | PSSLSAS | PDSLAVS | PSVFI |
| | QPGGSL | VKDYFPEPVTVSWN | GGS | SLRLSCAA | GGSGGG | VGDRVTI | LGERATI | FPPSD |
| | RLSCAA | SGALTSGVHTFPAV | (SEQ | SGFTFSDF | GS | TCRASQS | NCKSSQS | EQLKS |
| | SGFTFS | LQSSGLYSLSSVVT | ID NO: | WMHWVRQA | (SEQ | VSRSLAW | VLYSSNN | GTASV |
| | NSDMSW | VPSSSLGTQTYICN | 30) | PGKGLEWI | ID NO: | YQQKPGK | KNYLAWY | VCLLN |
| | VRQAPG | VNHKPSNTKVDKKV | | SYISGDSG | 22) | APKLLIY | QQKPGQP | NFYPR |
| | KGLEWV | EPKSCDKTHTCPPC | | YTNYADSV | | AASSLQS | PKLLIYW | EAKVQ |
| | SGITIS | PAPEAAGAPSVELE | | KGRFTISR | | GVPSRFS | ASTRESG | WKVDN |
| | GGSTYY | PPKPKDTLMISRTP | | DNSKNTLY | | GSGSGTD | VPDRFSG | ALQSG |
| | ADSVKG | EVTCVVVDVSHEDP | | LQMNSLRA | | FTLTISS | SGSGTDF | NSQES |
| | RFTISR | EVKFNWYVDGVEVH | | EDTAVYYC | | LQPEDFA | TLTISSL | VTEQD |
| | DNSKNT | NAKTKPREEQYNST | | ARDRPYYY | | TYYCQQY | QAEDVAV | SKDST |
| | LYLQMN | YRVVSVLTVLHQDW | | YMDVWGKG | | KSYPVTF | YYCQQYY | YSLSS |
| | SLRAED | LNGKEYKCKVSNKA | | TTVTVSS | | GQGTKVE | STPPTFG | TLTLS |
| | TAVYYC | LPAPIEKTISKAKG | | (SEQ ID | | IK (SEQ | QGTRLEI | KADYE |
| | ARGRGG | QPREPQVYTLPPSR | | NO: 591) | | ID NO: | K (SEQ | KHKVY |
| | SGWLDY | EEMTKNQVSLTCLV | | | | 592) | ID NO: | ACEVT |
| | WGQGTL | KGFYPSDIAVEWES | | | | | 598) | HQGLS |
| | VTVSS | NGQPENNYKTTPPV | | | | | | SPVTK |
| | (SEQ | LDSDGSFFLYSKLT | | | | | | SFNRG |
| | ID NO: | VDKSRWQQGNVFSC | | | | | | EC |
| | 1438) | SVMHEALHNHYTQK | | | | | | (SEQ |
| | | SLSLSPG (SEQ | | | | | | ID |
| | | ID NO: 44) | | | | | | NO: |
| | | | | | | | | 45) |
| PMAB154 | EVQLLE | ASTKGPSVFPLAPS | GGGGSG | EVQLLESG | GGGGSG | DIQMTQS | DIVMTQS | RTVAA |
| | SGGGLV | SKSTSGGTAALGCL | GGGSGG | GGLVQPGG | GGGSGG | PSSLSAS | PDSLAVS | PSVFI |
| | QPGGSL | VKDYFPEPVTVSWN | GGS | SLRLSCAA | GGSGGG | VGDRVTI | LGERATI | FPPSD |
| | RLSCAA | SGALTSGVHTFPAV | (SEQ | SGFTFSDF | GS | TCRASQS | NCKSSQS | EQLKS |
| | SGFTFS | LQSSGLYSLSSVVT | ID NO: | WMHWVRQA | (SEQ | VSRSLAW | VLYSPNN | GTASV |
| | NSDMSW | VPSSSLGTQTYICN | 30) | PGKGLEWI | ID NO: | YQQKPGK | SNYLAWY | VCLLN |
| | VRQAPG | VNHKPSNTKVDKKV | | SYISGDSG | 22) | APKLLIY | QQKPGQP | NFYPR |
| | KGLEWV | EPKSCDKTHTCPPC | | YTNYADSV | | AASSLQS | PKLLIYW | EAKVQ |
| | SGITIS | PAPEAAGAPSVELE | | KGRFTISR | | GVPSRFS | ASTRESG | WKVDN |
| | GGSTYY | PPKPKDTLMISRTP | | DNSKNTLY | | GSGSGTD | VPDRFSG | ALQSG |
| | ADSVKG | EVTCVVVDVSHEDP | | LQMNSLRA | | FTLTISS | SGSGTDF | NSQES |
| | RFTISR | EVKFNWYVDGVEVH | | EDTAVYYC | | LQPEDFA | TLTISSL | VTEQD |
| | DNSKNT | NAKTKPREEQYNST | | ARDRPYYY | | TYYCQQY | QAEDVAV | SKDST |
| | LYLQMN | YRVVSVLTVLHQDW | | YMDVWGKG | | KSYPVTF | YYCQQYY | YSLSS |
| | SLRAED | LNGKEYKCKVSNKA | | TTVTVSS | | GQGTKVE | TTPPTFG | TLTLS |
| | TAVYYC | LPAPIEKTISKAKG | | (SEQ ID | | IK (SEQ | QGTRLEI | KADYE |
| | ARGRGG | QPREPQVYTLPPSR | | NO: 591) | | ID NO: | K (SEQ | KHKVY |
| | SGWLDY | EEMTKNQVSLTCLV | | | | 592) | ID NO: | ACEVT |
| | WGQGTL | KGFYPSDIAVEWES | | | | | 1625) | HQGLS |
| | VTVSS | NGQPENNYKTTPPV | | | | | | SPVTK |
| | (SEQ | LDSDGSFFLYSKLT | | | | | | SFNRG |
| | ID NO: | VDKSRWQQGNVFSC | | | | | | EC |
| | 1438) | SVMHEALHNHYTQK | | | | | | (SEQ |
| | | SLSLSPG (SEQ | | | | | | ID |
| | | ID NO: 44) | | | | | | NO: |
| | | | | | | | | 45) |
| PMAB155 | EVQLLE | ASTKGPSVFPLAPS | GGGGSG | EVQLLESG | GGGGSG | DIQMTQS | DIVMTQS | RTVAA |
| | SGGGLV | SKSTSGGTAALGCL | GGGSGG | GGLVQPGG | GGGSGG | PSSLSAS | PDSLAVS | PSVFI |
| | QPGGSL | VKDYFPEPVTVSWN | GGS | SLRLSCAA | GGSGGG | VGDRVTI | LGERATI | FPPSD |
| | RLSCAA | SGALTSGVHTFPAV | (SEQ | SGFTFSDF | GS | TCRASQS | NCKSSQS | EQLKS |
| | SGFTFS | LQSSGLYSLSSVVT | ID NO: | WMHWVRQA | (SEQ | VSRSLAW | VLYSPNN | GTASV |
| | NSDMSW | VPSSSLGTQTYICN | 30) | PGKGLEWI | ID NO: | YQQKPGK | KNYLAWY | VCLLN |
| | VRQAPG | VNHKPSNTKVDKKV | | SYISGDSG | 22) | APKLLIY | QQKPGQP | NFYPR |
| | KGLEWV | EPKSCDKTHTCPPC | | YTNYADSV | | AASSLQS | PKLLIYD | EAKVQ |
| | SGITIS | PAPEAAGAPSVELE | | KGRFTISR | | GVPSRFS | ASTRESG | WKVDN |
| | GGSTYY | PPKPKDTLMISRTP | | DNSKNTLY | | GSGSGTD | VPDRFSG | ALQSG |
| | ADSVKG | EVTCVVVDVSHEDP | | LQMNSLRA | | FTLTISS | SGSGTDF | NSQES |
| | RFTISR | EVKFNWYVDGVEVH | | EDTAVYYC | | LQPEDFA | TLTISSL | VTEQD |
| | DNSKNT | NAKTKPREEQYNST | | ARDRPYYY | | TYYCQQY | QAEDVAV | SKDST |
| | LYLQMN | YRVVSVLTVLHQDW | | YMDVWGKG | | KSYPVTF | YYCQQYY | YSLSS |
| | SLRAED | LNGKEYKCKVSNKA | | TTVTVSS | | GQGTKVE | TTPPTFG | TLTLS |
| | TAVYYC | LPAPIEKTISKAKG | | (SEQ ID | | IK (SEQ | QGTRLEI | KADYE |
| | ARGRGG | QPREPQVYTLPPSR | | NO: 591) | | ID NO: | K (SEQ | KHKVY |
| | SGWLDY | EEMTKNQVSLTCLV | | | | 592) | ID NO: | ACEVT |
| | WGQGTL | KGFYPSDIAVEWES | | | | | 1626) | HQGLS |
| | VTVSS | NGQPENNYKTTPPV | | | | | | SPVTK |
| | (SEQ | LDSDGSFFLYSKLT | | | | | | SFNRG |
| | ID NO: | VDKSRWQQGNVFSC | | | | | | EC |
| | 1438) | SVMHEALHNHYTQK | | | | | | (SEQ |
| | | SLSLSPG (SEQ | | | | | | ID |
| | | ID NO: 44) | | | | | | NO: |
| | | | | | | | | 45) |
| PMAB156 | EVQLLE | ASTKGPSVFPLAPS | GGGGSG | EVQLLESG | GGGGSG | DIQMTQS | DIVMTQS | RTVAA |
| | SGGGLV | SKSTSGGTAALGCL | GGGSGG | GGLVQPGG | GGGSGG | PSSLSAS | PDSLAVS | PSVFI |
| | QPGGSL | VKDYFPEPVTVSWN | GGS | SLRLSCAA | GGSGGG | VGDRVTI | LGERATI | FPPSD |
| | RLSCAA | SGALTSGVHTFPAV | (SEQ | SGFTFSDF | GS | TCRASQS | NCKSSQS | EQLKS |
| | SGFTFS | LQSSGLYSLSSVVT | ID NO: | WMHWVRQA | (SEQ | VSRSLAW | VLYSPNN | GTASV |
| | NSDMSW | VPSSSLGTQTYICN | 30) | PGKGLEWI | ID NO: | YQQKPGK | KNYLAWY | VCLLN |
| | VRQAPG | VNHKPSNTKVDKKV | | SYISGDSG | 22) | APKLLIY | QQKPGQP | NFYPR |
| | KGLEWV | EPKSCDKTHTCPPC | | YTNYADSV | | AASSLQS | PKLLIYS | EAKVQ |
| | SGITIS | PAPEAAGAPSVELE | | KGRFTISR | | GVPSRFS | ASTRESG | WKVDN |
| | GGSTYY | PPKPKDTLMISRTP | | DNSKNTLY | | GSGSGTD | VPDRFSG | ALQSG |
| | ADSVKG | EVTCVVVDVSHEDP | | LQMNSLRA | | FTLTISS | SGSGTDF | NSQES |
| | RFTISR | EVKFNWYVDGVEVH | | EDTAVYYC | | LQPEDFA | TLTISSL | VTEQD |
| | DNSKNT | NAKTKPREEQYNST | | ARDRPYYY | | TYYCQQY | QAEDVAV | SKDST |
| | LYLQMN | YRVVSVLTVLHQDW | | YMDVWGKG | | KSYPVTF | YYCQQYY | YSLSS |
| | SLRAED | LNGKEYKCKVSNKA | | TTVTVSS | | GQGTKVE | TTPPTFG | TLTLS |
| | TAVYYC | LPAPIEKTISKAKG | | (SEQ ID | | IK (SEQ | QGTRLEI | KADYE |
| | ARGRGG | QPREPQVYTLPPSR | | NO: 591) | | ID NO: | K (SEQ | KHKVY |
| | SGWLDY | EEMTKNQVSLTCLV | | | | 592) | ID NO: | ACEVT |
| | WGQGTL | KGFYPSDIAVEWES | | | | | 1627) | HQGLS |
| | VTVSS | NGQPENNYKTTPPV | | | | | | SPVTK |
| | (SEQ | LDSDGSFFLYSKLT | | | | | | SFNRG |
| | ID NO: | VDKSRWQQGNVFSC | | | | | | EC |
| | 1438) | SVMHEALHNHYTQK | | | | | | (SEQ |
| | | SLSLSPG (SEQ | | | | | | ID |
| | | ID NO: 44) | | | | | | NO: |
| | | | | | | | | 45) |
| PMAB157 | EVQLLE | ASTKGPSVFPLAPS | GGGGSG | EVQLLESG | GGGGSG | DIQMTQS | DIVMTQS | RTVAA |
| | SGGGLV | SKSTSGGTAALGCL | GGGSGG | GGLVQPGG | GGGSGG | PSSLSAS | PDSLAVS | PSVFI |
| | QPGGSL | VKDYFPEPVTVSWN | GGS | SLRLSCAA | GGSGGG | VGDRVTI | LGERATI | FPPSD |
| | RLSCAA | SGALTSGVHTFPAV | (SEQ | SGFTFSDF | GS | TCRASQS | NCKSSQS | EQLKS |
| | SGFTFS | LQSSGLYSLSSVVT | ID NO: | WMHWVRQA | (SEQ | VSRSLAW | VLASPNN | GTASV |
| | NSDMSW | VPSSSLGTQTYICN | 30) | PGKGLEWI | ID NO: | YQQKPGK | KNYLAWY | VCLLN |
| | VRQAPG | VNHKPSNTKVDKKV | | SYISGDSG | 22) | APKLLIY | QQKPGQP | NFYPR |
| | KGLEWV | EPKSCDKTHTCPPC | | YTNYADSV | | AASSLQS | PKLLIYW | EAKVQ |
| | SGITIS | PAPEAAGAPSVELE | | KGRFTISR | | GVPSRFS | ASTRESG | WKVDN |
| | GGSTYY | PPKPKDTLMISRTP | | DNSKNTLY | | GSGSGTD | VPDRFSG | ALQSG |
| | ADSVKG | EVTCVVVDVSHEDP | | LQMNSLRA | | FTLTISS | SGSGTDF | NSQES |
| | RFTISR | EVKFNWYVDGVEVH | | EDTAVYYC | | LQPEDFA | TLTISSL | VTEQD |
| | DNSKNT | NAKTKPREEQYNST | | ARDRPYYY | | TYYCQQY | QAEDVAV | SKDST |
| | LYLQMN | YRVVSVLTVLHQDW | | YMDVWGKG | | KSYPVTF | YYCQQYY | YSLSS |
| | SLRAED | LNGKEYKCKVSNKA | | TTVTVSS | | GQGTKVE | TTPPTFG | TLTLS |
| | TAVYYC | LPAPIEKTISKAKG | | (SEQ ID | | IK (SEQ | QGTRLEI | KADYE |
| | ARGRGG | QPREPQVYTLPPSR | | NO: 591) | | ID NO: | K (SEQ | KHKVY |
| | SGWLDY | EEMTKNQVSLTCLV | | | | 592) | ID NO: | ACEVT |
| | WGQGTL | KGFYPSDIAVEWES | | | | | 1628) | HQGLS |
| | VTVSS | NGQPENNYKTTPPV | | | | | | SPVTK |
| | (SEQ | LDSDGSFFLYSKLT | | | | | | SFNRG |
| | ID NO: | VDKSRWQQGNVFSC | | | | | | EC |
| | 1438) | SVMHEALHNHYTQK | | | | | | (SEQ |
| | | SLSLSPG (SEQ | | | | | | ID |
| | | ID NO: 44) | | | | | | NO: |
| | | | | | | | | 45) |
| PMAB158 | EVQLLE | ASTKGPSVFPLAPS | GGGGSG | EVQLLESG | GGGGSG | DIQMTQS | DIVMTQS | RTVAA |
| | SGGGLV | SKSTSGGTAALGCL | GGGSGG | GGLVQPGG | GGGSGG | PSSLSAS | PDSLAVS | PSVFI |
| | QPGGSL | VKDYFPEPVTVSWN | GGS | SLRLSCAA | GGSGGG | VGDRVTI | LGERATI | FPPSD |
| | RLSCAA | SGALTSGVHTFPAV | (SEQ | SGFTFSDF | GS | TCRASQS | NCKSSQS | EQLKS |
| | SGFTFS | LQSSGLYSLSSVVT | ID NO: | WMHWVRQA | (SEQ | VSRSLAW | VLYSPNN | GTASV |
| | NSDMSW | VPSSSLGTQTYICN | 30) | PGKGLEWI | ID NO: | YQQKPGK | KNTLAWY | VCLLN |
| | VRQAPG | VNHKPSNTKVDKKV | | SYISGDSG | 22) | APKLLIY | QQKPGQP | NFYPR |
| | KGLEWV | EPKSCDKTHTCPPC | | YTNYADSV | | AASSLQS | PKLLIYW | EAKVQ |
| | SGITIS | PAPEAAGAPSVELE | | KGRFTISR | | GVPSRFS | ASTRESG | WKVDN |
| | GGSTYY | PPKPKDTLMISRTP | | DNSKNTLY | | GSGSGTD | VPDRFSG | ALQSG |
| | ADSVKG | EVTCVVVDVSHEDP | | LQMNSLRA | | FTLTISS | SGSGTDF | NSQES |
| | RFTISR | EVKFNWYVDGVEVH | | EDTAVYYC | | LQPEDFA | TLTISSL | VTEQD |
| | DNSKNT | NAKTKPREEQYNST | | ARDRPYYY | | TYYCQQY | QAEDVAV | SKDST |
| | LYLQMN | YRVVSVLTVLHQDW | | YMDVWGKG | | KSYPVTF | YYCQQYY | YSLSS |
| | SLRAED | LNGKEYKCKVSNKA | | TTVTVSS | | GQGTKVE | TTPPTFG | TLTLS |
| | TAVYYC | LPAPIEKTISKAKG | | (SEQ ID | | IK (SEQ | QGTRLEI | KADYE |
| | ARGRGG | QPREPQVYTLPPSR | | NO: 591) | | ID NO: | K (SEQ | KHKVY |
| | SGWLDY | EEMTKNQVSLTCLV | | | | 592) | ID NO: | ACEVT |
| | WGQGTL | KGFYPSDIAVEWES | | | | | 1629) | HQGLS |
| | VTVSS | NGQPENNYKTTPPV | | | | | | SPVTK |
| | (SEQ | LDSDGSFFLYSKLT | | | | | | SFNRG |
| | ID NO: | VDKSRWQQGNVFSC | | | | | | EC |
| | 1438) | SVMHEALHNHYTQK | | | | | | (SEQ |
| | | SLSLSPG (SEQ | | | | | | ID |
| | | ID NO: 44) | | | | | | NO: |
| | | | | | | | | 45) |
| PMAB159 | EVQLLE | ASTKGPSVFPLAPS | GGGGSG | EVQLLESG | GGGGSG | DIQMTQS | DIVMTQS | RTVAA |
| | SGGGLV | SKSTSGGTAALGCL | GGGSGG | GGLVQPGG | GGGSGG | PSSLSAS | PDSLAVS | PSVFI |
| | QPGGSL | VKDYFPEPVTVSWN | GGS | SLRLSCAA | GGSGGG | VGDRVTI | LGERATI | FPPSD |
| | RLSCAA | SGALTSGVHTFPAV | (SEQ | SGFTFSDF | GS | TCRASQS | NCKSSQS | EQLKS |
| | SGFTFS | LQSSGLYSLSSVVT | ID NO: | WMHWVRQA | (SEQ | VSRSLAW | VLYSPNN | GTASV |
| | NSDMSW | VPSSSLGTQTYICN | 30) | PGKGLEWI | ID NO: | YQQKPGK | KNYLAWY | VCLLN |
| | VRQAPG | VNHKPSNTKVDKKV | | SYISGDSG | 22) | APKLLIY | QQKPGQP | NFYPR |
| | KGLEWV | EPKSCDKTHTCPPC | | YTNYADSV | | AASSLQS | PKLLISW | EAKVQ |
| | SGITIS | PAPEAAGAPSVELE | | KGRFTISR | | GVPSRFS | ASTRESG | WKVDN |
| | GGSTYY | PPKPKDTLMISRTP | | DNSKNTLY | | GSGSGTD | VPDRFSG | ALQSG |
| | ADSVKG | EVTCVVVDVSHEDP | | LQMNSLRA | | FTLTISS | SGSGTDF | NSQES |
| | RFTISR | EVKFNWYVDGVEVH | | EDTAVYYC | | LQPEDFA | TLTISSL | VTEQD |
| | DNSKNT | NAKTKPREEQYNST | | ARDRPYYY | | TYYCQQY | QAEDVAV | SKDST |
| | LYLQMN | YRVVSVLTVLHQDW | | YMDVWGKG | | KSYPVTF | YYCQQYY | YSLSS |
| | SLRAED | LNGKEYKCKVSNKA | | TTVTVSS | | GQGTKVE | TTPPTFG | TLTLS |
| | TAVYYC | LPAPIEKTISKAKG | | (SEQ ID | | IK (SEQ | QGTRLEI | KADYE |
| | ARGRGG | QPREPQVYTLPPSR | | NO: 591) | | ID NO: | K (SEQ | KHKVY |
| | SGWLDY | EEMTKNQVSLTCLV | | | | 592) | ID NO: | ACEVT |
| | WGQGTL | KGFYPSDIAVEWES | | | | | 1630) | HQGLS |
| | VTVSS | NGQPENNYKTTPPV | | | | | | SPVTK |
| | (SEQ | LDSDGSFFLYSKLT | | | | | | SFNRG |
| | ID NO: | VDKSRWQQGNVFSC | | | | | | EC |
| | 1438) | SVMHEALHNHYTQK | | | | | | (SEQ |
| | | SLSLSPG (SEQ | | | | | | ID |
| | | ID NO: 44) | | | | | | NO: |
| | | | | | | | | 45) |
| PMAB160 | EVQLLE | ASTKGPSVFPLAPS | GGGGSG | EVQLLESG | GGGGSG | DIQMTQS | DIVMTQS | RTVAA |
| | SGGGLV | SKSTSGGTAALGCL | GGGSGG | GGLVQPGG | GGGSGG | PSSLSAS | PDSLAVS | PSVFI |
| | QPGGSL | VKDYFPEPVTVSWN | GGS | SLRLSCAA | GGSGGG | VGDRVTI | LGERATI | FPPSD |
| | RLSCAA | SGALTSGVHTFPAV | (SEQ | SGFTFSDF | GS | TCRASQS | NCKSSQS | EQLKS |
| | SGFTFS | LQSSGLYSLSSVVT | ID NO: | WMHWVRQA | (SEQ | VSRSLAW | VLYSPNN | GTASV |
| | NSDMSW | VPSSSLGTQTYICN | 30) | PGKGLEWI | ID NO: | YQQKPGK | KNYLAWY | VCLLN |
| | VRQAPG | VNHKPSNTKVDKKV | | SYISGDSG | 22) | APKLLIY | QQKPGQP | NFYPR |
| | KGLEWV | EPKSCDKTHTCPPC | | YTNYADSV | | AASSLQS | PKLLIYW | EAKVQ |
| | SGITIS | PAPEAAGAPSVELE | | KGRFTISR | | GVPSRFS | ASTRESG | WKVDN |
| | GGSTYY | PPKPKDTLMISRTP | | DNSKNTLY | | GSGSGTD | VPDRFSG | ALQSG |
| | ADSVKG | EVTCVVVDVSHEDP | | LQMNSLRA | | FTLTISS | SGSGTDF | NSQES |
| | RFTISR | EVKFNWYVDGVEVH | | EDTAVYYC | | LQPEDFA | TLTISSL | VTEQD |
| | DNSKNT | NAKTKPREEQYNST | | ARDRPYYY | | TYYCQQY | QAEDVAV | SKDST |
| | LYLQMN | YRVVSVLTVLHQDW | | YMDVWGKG | | KSYPVTF | YYCQQYE | YSLSS |
| | SLRAED | LNGKEYKCKVSNKA | | TTVTVSS | | GQGTKVE | TTPPTFG | TLTLS |
| | TAVYYC | LPAPIEKTISKAKG | | (SEQ ID | | IK (SEQ | QGTRLEI | KADYE |
| | ARGRGG | QPREPQVYTLPPSR | | NO: 591) | | ID NO: | K (SEQ | KHKVY |
| | SGWLDY | EEMTKNQVSLTCLV | | | | 592) | ID NO: | ACEVT |
| | WGQGTL | KGFYPSDIAVEWES | | | | | 1631) | HQGLS |
| | VTVSS | NGQPENNYKTTPPV | | | | | | SPVTK |
| | (SEQ | LDSDGSFFLYSKLT | | | | | | SFNRG |
| | ID NO: | VDKSRWQQGNVFSC | | | | | | EC |
| | 1438) | SVMHEALHNHYTQK | | | | | | (SEQ |
| | | SLSLSPG (SEQ | | | | | | ID |
| | | ID NO: 44) | | | | | | NO: |
| | | | | | | | | 45) |
| PMAB161 | EVQLLE | ASTKGPSVFPLAPS | GGGGSG | EVQLLESG | GGGGSG | DIQMTQS | DIVMTQS | RTVAA |
| | SGGGLV | SKSTSGGTAALGCL | GGGSGG | GGLVQPGG | GGGSGG | PSSLSAS | PDSLAVS | PSVFI |
| | QPGGSL | VKDYFPEPVTVSWN | GGS | SLRLSCAA | GGSGGG | VGDRVTI | LGERATI | FPPSD |
| | RLSCAA | SGALTSGVHTFPAV | (SEQ | SGFTFSDF | GS | TCRASQS | NCKSSQS | EQLKS |
| | SGFTFS | LQSSGLYSLSSVVT | ID NO: | WMHWVRQA | (SEQ | VSRSLAW | VLYSPNN | GTASV |
| | NSDMSW | VPSSSLGTQTYICN | 30) | PGKGLEWI | ID NO: | YQQKPGK | KNYLAWY | VCLLN |
| | VRQAPG | VNHKPSNTKVDKKV | | SYISGDSG | 22) | APKLLIY | QQKPGQP | NFYPR |
| | KGLEWV | EPKSCDKTHTCPPC | | YTNYADSV | | AASSLQS | PKLLIYW | EAKVQ |
| | SGITIS | PAPEAAGAPSVELE | | KGRFTISR | | GVPSRFS | ASTRESG | WKVDN |
| | GGSTYY | PPKPKDTLMISRTP | | DNSKNTLY | | GSGSGTD | VPDRFSG | ALQSG |
| | ADSVKG | EVTCVVVDVSHEDP | | LQMNSLRA | | FTLTISS | SGSGTDF | NSQES |
| | RFTISR | EVKFNWYVDGVEVH | | EDTAVYYC | | LQPEDFA | TLTISSL | VTEQD |
| | DNSKNT | NAKTKPREEQYNST | | ARDRPYYY | | TYYCQQY | QAEDVAV | SKDST |
| | LYLQMN | YRVVSVLTVLHQDW | | YMDVWGKG | | KSYPVTF | YYCQQYS | YSLSS |
| | SLRAED | LNGKEYKCKVSNKA | | TTVTVSS | | GQGTKVE | TTPPTFG | TLTLS |
| | TAVYYC | LPAPIEKTISKAKG | | (SEQ ID | | IK (SEQ | QGTRLEI | KADYE |
| | ARGRGG | QPREPQVYTLPPSR | | NO: 591) | | ID NO: | K (SEQ | KHKVY |
| | SGWLDY | EEMTKNQVSLTCLV | | | | 592) | ID NO: | ACEVT |
| | WGQGTL | KGFYPSDIAVEWES | | | | | 1632) | HQGLS |
| | VTVSS | NGQPENNYKTTPPV | | | | | | SPVTK |
| | (SEQ | LDSDGSFFLYSKLT | | | | | | SFNRG |
| | ID NO: | VDKSRWQQGNVFSC | | | | | | EC |
| | 1438) | SVMHEALHNHYTQK | | | | | | (SEQ |
| | | SLSLSPG (SEQ | | | | | | ID |
| | | ID NO: 44) | | | | | | NO: |
| | | | | | | | | 45) |
| PMAB162 | EVQLLE | ASTKGPSVFPLAPS | GGGGSG | EVQLLESG | GGGGSG | DIQMTQS | DIVMTQS | RTVAA |
| | SGGGLV | SKSTSGGTAALGCL | GGGSGG | GGLVQPGG | GGGSGG | PSSLSAS | PDSLAVS | PSVFI |
| | QPGGSL | VKDYFPEPVTVSWN | GGS | SLRLSCAA | GGSGGG | VGDRVTI | LGERATI | FPPSD |
| | RLSCAA | SGALTSGVHTFPAV | (SEQ | SGFTFSDF | GS | TCRASQS | NCKSSQS | EQLKS |
| | SGFTFS | LQSSGLYSLSSVVT | ID NO: | WMHWVRQA | (SEQ | VSRSLAW | VLYSPNN | GTASV |
| | NSDMSW | VPSSSLGTQTYICN | 30) | PGKGLEWI | ID NO: | YQQKPGK | KNYLAWY | VCLLN |
| | VRQAPG | VNHKPSNTKVDKKV | | SYISGDSG | 22) | APKLLIY | QQKPGQP | NFYPR |
| | KGLEWV | EPKSCDKTHTCPPC | | YTNYADSV | | AASSLQS | PKLLIYW | EAKVQ |
| | SGITIS | PAPEAAGAPSVELE | | KGRFTISR | | GVPSRFS | ASTRESG | WKVDN |
| | GGSTYY | PPKPKDTLMISRTP | | DNSKNTLY | | GSGSGTD | VPDRFSG | ALQSG |
| | AASVKG | EVTCVVVDVSHEDP | | LQMNSLRA | | FTLTISS | SGSGTDF | NSQES |
| | RFTISR | EVKFNWYVDGVEVH | | EDTAVYYC | | LQPEDFA | TLTISSL | VTEQD |
| | DNSKNT | NAKTKPREEQYNST | | ARDRPYYY | | TYYCQQY | QAEDVAV | SKDST |
| | LYLQMN | YRVVSVLTVLHQDW | | YMDVWGKG | | KSYPVTF | YYCQQYY | YSLSS |
| | SLRAED | LNGKEYKCKVSNKA | | TTVTVSS | | GQGTKVE | TTPPTFG | TLTLS |
| | TAVYYC | LPAPIEKTISKAKG | | (SEQ ID | | IK (SEQ | QGTRLEI | KADYE |
| | ARGRGG | QPREPQVYTLPPSR | | NO: 591) | | ID NO: | K (SEQ | KHKVY |
| | SGWLDY | EEMTKNQVSLTCLV | | | | 592) | ID NO: | ACEVT |
| | WGQGTL | KGFYPSDIAVEWES | | | | | 1359) | HQGLS |
| | VTVSS | NGQPENNYKTTPPV | | | | | | SPVTK |
| | (SEQ | LDSDGSFFLYSKLT | | | | | | SFNRG |
| | ID NO: | VDKSRWQQGNVFSC | | | | | | EC |
| | 1633) | SVMHEALHNHYTQK | | | | | | (SEQ |
| | | SLSLSPG (SEQ | | | | | | ID |
| | | ID NO: 44) | | | | | | NO: |
| | | | | | | | | 45) |
| PMAB163 | EVQLLE | ASTKGPSVFPLAPS | GGGGSG | EVQLLESG | GGGGSG | DIQMTQS | DIVMTQS | RTVAA |
| | SGGGLV | SKSTSGGTAALGCL | GGGSGG | GGLVQPGG | GGGSGG | PSSLSAS | PDSLAVS | PSVFI |
| | QPGGSL | VKDYFPEPVTVSWN | GGS | SLRLSCAA | GGSGGG | VGDRVTI | LGERATI | FPPSD |
| | RLSCAA | SGALTSGVHTFPAV | (SEQ | SGFTFSDF | GS | TCRASQS | NCKSSQS | EQLKS |
| | SGFTFS | LQSSGLYSLSSVVT | ID NO: | WMHWVRQA | (SEQ | VSRSLAW | VLYSPNN | GTASV |
| | NSDMSW | VPSSSLGTQTYICN | 30) | PGKGLEWI | ID NO: | YQQKPGK | KNYLAWY | VCLLN |
| | VRQAPG | VNHKPSNTKVDKKV | | SYISGDSG | 22) | APKLLIY | QQKPGQP | NFYPR |
| | KGLEWV | EPKSCDKTHTCPPC | | YTNYADSV | | AASSLQS | PKLLIYW | EAKVQ |
| | SGITIS | PAPEAAGAPSVELE | | KGRFTISR | | GVPSRFS | ASTRESG | WKVDN |
| | GGSTYY | PPKPKDTLMISRTP | | DNSKNTLY | | GSGSGTD | VPDRFSG | ALQSG |
| | AQSVKG | EVTCVVVDVSHEDP | | LQMNSLRA | | FTLTISS | SGSGTDF | NSQES |
| | RFTISR | EVKFNWYVDGVEVH | | EDTAVYYC | | LQPEDFA | TLTISSL | VTEQD |
| | DNSKNT | NAKTKPREEQYNST | | ARDRPYYY | | TYYCQQY | QAEDVAV | SKDST |
| | LYLQMN | YRVVSVLTVLHQDW | | YMDVWGKG | | KSYPVTF | YYCQQYY | YSLSS |
| | SLRAED | LNGKEYKCKVSNKA | | TTVTVSS | | GQGTKVE | TTPPTFG | TLTLS |
| | TAVYYC | LPAPIEKTISKAKG | | (SEQ ID | | IK (SEQ | QGTRLEI | KADYE |
| | ARGRGG | QPREPQVYTLPPSR | | NO: 591) | | ID NO: | K (SEQ | KHKVY |
| | SGWLDY | EEMTKNQVSLTCLV | | | | 592) | ID NO: | ACEVT |
| | WGQGTL | KGFYPSDIAVEWES | | | | | 1359) | HQGLS |
| | VTVSS | NGQPENNYKTTPPV | | | | | | SPVTK |
| | (SEQ | LDSDGSFFLYSKLT | | | | | | SFNRG |
| | ID NO: | VDKSRWQQGNVFSC | | | | | | EC |
| | 1634) | SVMHEALHNHYTQK | | | | | | (SEQ |
| | | SLSLSPG (SEQ | | | | | | ID |
| | | ID NO: 44) | | | | | | NO: |
| | | | | | | | | 45) |
| PMAB164 | EVQLLE | ASTKGPSVFPLAPS | GGGGSG | EVQLLESG | GGGGSG | DIQMTQS | DIVMTQS | RTVAA |
| | SGGGLV | SKSTSGGTAALGCL | GGGSGG | GGLVQPGG | GGGSGG | PSSLSAS | PDSLAVS | PSVFI |
| | QPGGSL | VKDYFPEPVTVSWN | GGS | SLRLSCAA | GGSGGG | VGDRVTI | LGERATI | FPPSD |
| | RLSCAA | SGALTSGVHTFPAV | (SEQ | SGFTFSDF | GS | TCRASQS | NCKSSQS | EQLKS |
| | SGFTFS | LQSSGLYSLSSVVT | ID NO: | WMHWVRQA | (SEQ | VSRSLAW | VLYSPNN | GTASV |
| | NSDMSW | VPSSSLGTQTYICN | 30) | PGKGLEWI | ID NO: | YQQKPGK | KNYLAWY | VCLLN |
| | VRQAPG | VNHKPSNTKVDKKV | | SYISGDSG | 22) | APKLLIY | QQKPGQP | NFYPR |
| | KGLEWV | EPKSCDKTHTCPPC | | YTNYADSV | | AASSLQS | PKLLIYW | EAKVQ |
| | SGITIS | PAPEAAGAPSVELE | | KGRFTISR | | GVPSRFS | ASTRESG | WKVDN |
| | GGSTYY | PPKPKDTLMISRTP | | DNSKNTLY | | GSGSGTD | VPDRFSG | ALQSG |
| | ADSVRG | EVTCVVVDVSHEDP | | LQMNSLRA | | FTLTISS | SGSGTDF | NSQES |
| | RFTISR | EVKFNWYVDGVEVH | | EDTAVYYC | | LQPEDFA | TLTISSL | VTEQD |
| | DNSKNT | NAKTKPREEQYNST | | ARDRPYYY | | TYYCQQY | QAEDVAV | SKDST |
| | LYLQMN | YRVVSVLTVLHQDW | | YMDVWGKG | | KSYPVTF | YYCQQYY | YSLSS |
| | SLRAED | LNGKEYKCKVSNKA | | TTVTVSS | | GQGTKVE | TTPPTFG | TLTLS |
| | TAVYYC | LPAPIEKTISKAKG | | (SEQ ID | | IK (SEQ | QGTRLEI | KADYE |
| | ARGRGG | QPREPQVYTLPPSR | | NO: 591) | | ID NO: | K (SEQ | KHKVY |
| | SGWLDY | EEMTKNQVSLTCLV | | | | 592) | ID NO: | ACEVT |
| | WGQGTL | KGFYPSDIAVEWES | | | | | 1359) | HQGLS |
| | VTVSS | NGQPENNYKTTPPV | | | | | | SPVTK |
| | (SEQ | LDSDGSFFLYSKLT | | | | | | SFNRG |
| | ID NO: | VDKSRWQQGNVFSC | | | | | | EC |
| | 1635) | SVMHEALHNHYTQK | | | | | | (SEQ |
| | | SLSLSPG (SEQ | | | | | | ID |
| | | ID NO: 44) | | | | | | NO: |
| | | | | | | | | 45) |
| PMAB165 | EVQLLE | ASTKGPSVFPLAPS | GGGGSG | EVQLLESG | GGGGSG | DIQMTQS | DIVMTQS | RTVAA |
| | SGGGLV | SKSTSGGTAALGCL | GGGSGG | GGLVQPGG | GGGSGG | PSSLSAS | PDSLAVS | PSVFI |
| | QPGGSL | VKDYFPEPVTVSWN | GGS | SLRLSCAA | GGSGGG | VGDRVTI | LGERATI | FPPSD |
| | RLSCAA | SGALTSGVHTFPAV | (SEQ | SGFTFSDF | GS | TCRASQS | NCKSSQS | EQLKS |
| | SGFTFS | LQSSGLYSLSSVVT | ID NO: | WMHWVRQA | (SEQ | VSRSLAW | VLYSPNN | GTASV |
| | ASDMSW | VPSSSLGTQTYICN | 30) | PGKGLEWI | ID NO: | YQQKPGK | KNYLAWY | VCLLN |
| | VRQAPG | VNHKPSNTKVDKKV | | SYISGDSG | 22) | APKLLIY | QQKPGQP | NFYPR |
| | KGLEWV | EPKSCDKTHTCPPC | | YTNYADSV | | AASSLQS | PKLLIYW | EAKVQ |
| | SGITIS | PAPEAAGAPSVELE | | KGRFTISR | | GVPSRFS | ASTRESG | WKVDN |
| | GGSTYY | PPKPKDTLMISRTP | | DNSKNTLY | | GSGSGTD | VPDRFSG | ALQSG |
| | ADSVKG | EVTCVVVDVSHEDP | | LQMNSLRA | | FTLTISS | SGSGTDF | NSQES |
| | RFTISR | EVKFNWYVDGVEVH | | EDTAVYYC | | LQPEDFA | TLTISSL | VTEQD |
| | DNSKNT | NAKTKPREEQYNST | | ARDRPYYY | | TYYCQQY | QAEDVAV | SKDST |
| | LYLQMN | YRVVSVLTVLHQDW | | YMDVWGKG | | KSYPVTF | YYCQQYY | YSLSS |
| | SLRAED | LNGKEYKCKVSNKA | | TTVTVSS | | GQGTKVE | TTPPTFG | TLTLS |
| | TAVYYC | LPAPIEKTISKAKG | | (SEQ ID | | IK (SEQ | QGTRLEI | KADYE |
| | ARGRGG | QPREPQVYTLPPSR | | NO: 591) | | ID NO: | K (SEQ | KHKVY |
| | SGWLDY | EEMTKNQVSLTCLV | | | | 592) | ID NO: | ACEVT |
| | WGQGTL | KGFYPSDIAVEWES | | | | | 1359) | HQGLS |
| | VTVSS | NGQPENNYKTTPPV | | | | | | SPVTK |
| | (SEQ | LDSDGSFFLYSKLT | | | | | | SFNRG |
| | ID NO: | VDKSRWQQGNVFSC | | | | | | EC |
| | 1636) | SVMHEALHNHYTQK | | | | | | (SEQ |
| | | SLSLSPG (SEQ | | | | | | ID |
| | | ID NO: 44) | | | | | | NO: |
| | | | | | | | | 45) |
| PMAB166 | EVQLLE | ASTKGPSVFPLAPS | GGGGSG | EVQLLESG | GGGGSG | DIQMTQS | DIVMTQS | RTVAA |
| | SGGGLV | SKSTSGGTAALGCL | GGGSGG | GGLVQPGG | GGGSGG | PSSLSAS | PDSLAVS | PSVFI |
| | QPGGSL | VKDYFPEPVTVSWN | GGS | SLRLSCAA | GGSGGG | VGDRVTI | LGERATI | FPPSD |
| | RLSCAA | SGALTSGVHTFPAV | (SEQ | SGFTFSDF | GS | TCRASQS | NCKSSQS | EQLKS |
| | SGFTFS | LQSSGLYSLSSVVT | ID NO: | WMHWVRQA | (SEQ | VSRSLAW | VLYSPNN | GTASV |
| | QSDMSW | VPSSSLGTQTYICN | 30) | PGKGLEWI | ID NO: | YQQKPGK | KNYLAWY | VCLLN |
| | VRQAPG | VNHKPSNTKVDKKV | | SYISGDSG | 22) | APKLLIY | QQKPGQP | NFYPR |
| | KGLEWV | EPKSCDKTHTCPPC | | YTNYADSV | | AASSLQS | PKLLIYW | EAKVQ |
| | SGITIS | PAPEAAGAPSVELE | | KGRFTISR | | GVPSRFS | ASTRESG | WKVDN |
| | GGSTYY | PPKPKDTLMISRTP | | DNSKNTLY | | GSGSGTD | VPDRFSG | ALQSG |
| | ADSVKG | EVTCVVVDVSHEDP | | LQMNSLRA | | FTLTISS | SGSGTDF | NSQES |
| | RFTISR | EVKFNWYVDGVEVH | | EDTAVYYC | | LQPEDFA | TLTISSL | VTEQD |
| | DNSKNT | NAKTKPREEQYNST | | ARDRPYYY | | TYYCQQY | QAEDVAV | SKDST |
| | LYLQMN | YRVVSVLTVLHQDW | | YMDVWGKG | | KSYPVTF | YYCQQYY | YSLSS |
| | SLRAED | LNGKEYKCKVSNKA | | TTVTVSS | | GQGTKVE | TTPPTFG | TLTLS |
| | TAVYYC | LPAPIEKTISKAKG | | (SEQ ID | | IK (SEQ | QGTRLEI | KADYE |
| | ARGRGG | QPREPQVYTLPPSR | | NO: 591) | | ID NO: | K (SEQ | KHKVY |
| | SGWLDY | EEMTKNQVSLTCLV | | | | 592) | ID NO: | ACEVT |
| | WGQGTL | KGFYPSDIAVEWES | | | | | 1359) | HQGLS |
| | VTVSS | NGQPENNYKTTPPV | | | | | | SPVTK |
| | (SEQ | LDSDGSFFLYSKLT | | | | | | SFNRG |
| | ID NO: | VDKSRWQQGNVFSC | | | | | | EC |
| | 1637) | SVMHEALHNHYTQK | | | | | | (SEQ |
| | | SLSLSPG (SEQ | | | | | | ID |
| | | ID NO: 44) | | | | | | NO: |
| | | | | | | | | 45) |
| PMAB167 | EVQLLE | ASTKGPSVFPLAPS | GGGGSG | EVQLLESG | GGGGSG | DIQMTQS | DIVMTQS | RTVAA |
| | SGGGLV | SKSTSGGTAALGCL | GGGSGG | GGLVQPGG | GGGSGG | PSSLSAS | PDSLAVS | PSVFI |
| | QPGGSL | VKDYFPEPVTVSWN | GGS | SLRLSCAA | GGSGGG | VGDRVTI | LGERATI | FPPSD |
| | RLSCAA | SGALTSGVHTFPAV | (SEQ | SGFTFSDF | GS | TCRASQS | NCKSSQS | EQLKS |
| | SGFTFS | LQSSGLYSLSSVVT | ID NO: | WMHWVRQA | (SEQ | VSRSLAW | VLYSSNN | GTASV |
| | NSDMSW | VPSSSLGTQTYICN | 30) | PGKGLEWI | ID NO: | YQQKPGK | RNYLAWY | VCLLN |
| | VRQAPG | VNHKPSNTKVDKKV | | SYISGDSG | 22) | APKLLIY | QQKPGQP | NFYPR |
| | KGLEWV | EPKSCDKTHTCPPC | | YTNYADSV | | AASSLQS | PKLLIYW | EAKVQ |
| | SGITIS | PAPEAAGAPSVELE | | KGRFTISR | | GVPSRFS | ASTRESG | WKVDN |
| | GGSTYY | PPKPKDTLMISRTP | | DNSKNTLY | | GSGSGTD | VPDRFSG | ALQSG |
| | ADSVKG | EVTCVVVDVSHEDP | | LQMNSLRA | | FTLTISS | SGSGTDF | NSQES |
| | RFTISR | EVKFNWYVDGVEVH | | EDTAVYYC | | LQPEDFA | TLTISSL | VTEQD |
| | DNSKNT | NAKTKPREEQYNST | | ARDRPYYY | | TYYCQQY | QAEDVAV | SKDST |
| | LYLQMN | YRVVSVLTVLHQDW | | YMDVWGKG | | KSYPVTF | YYCQQYY | YSLSS |
| | SLRAED | LNGKEYKCKVSNKA | | TTVTVSS | | GQGTKVE | STPPTFG | TLTLS |
| | TAVYYC | LPAPIEKTISKAKG | | (SEQ ID | | IK (SEQ | QGTRLEI | KADYE |
| | ARGRGG | QPREPQVYTLPPSR | | NO: 591) | | ID NO: | K (SEQ | KHKVY |
| | SGWLDY | EEMTKNQVSLTCLV | | | | 592) | ID NO: | ACEVT |
| | WGQGTL | KGFYPSDIAVEWES | | | | | 1638) | HQGLS |
| | VTVSS | NGQPENNYKTTPPV | | | | | | SPVTK |
| | (SEQ | LDSDGSFFLYSKLT | | | | | | SFNRG |
| | ID NO: | VDKSRWQQGNVFSC | | | | | | EC |
| | 1438) | SVMHEALHNHYTQK | | | | | | (SEQ |
| | | SLSLSPG (SEQ | | | | | | ID |
| | | ID NO: 44) | | | | | | NO: |
| | | | | | | | | 45) |
| PMAB168 | EVQLLE | ASTKGPSVFPLAPS | GGGGSG | EVQLLESG | GGGGSG | DIQMTQS | DIVMTQS | RTVAA |
| | SGGGLV | SKSTSGGTAALGCL | GGGSGG | GGLVQPGG | GGGSGG | PSSLSAS | PDSLAVS | PSVFI |
| | QPGGSL | VKDYFPEPVTVSWN | GGS | SLRLSCAA | GGSGGG | VGDRVTI | LGERATI | FPPSD |
| | RLSCAA | SGALTSGVHTFPAV | (SEQ | SGFTFSDF | GS | TCRASQS | NCKSSQS | EQLKS |
| | SGFTFS | LQSSGLYSLSSVVT | ID NO: | WMHWVRQA | (SEQ | VSRSLAW | VLYSSNA | GTASV |
| | NSDMSW | VPSSSLGTQTYICN | 30) | PGKGLEWI | ID NO: | YQQKPGK | RNYLAWY | VCLLN |
| | VRQAPG | VNHKPSNTKVDKKV | | SYISGDSG | 22) | APKLLIY | QQKPGQP | NFYPR |
| | KGLEWV | EPKSCDKTHTCPPC | | YTNYADSV | | AASSLQS | PKLLIYW | EAKVQ |
| | SGITIS | PAPEAAGAPSVELE | | KGRFTISR | | GVPSRFS | ASTRESG | WKVDN |
| | GGSTYY | PPKPKDTLMISRTP | | DNSKNTLY | | GSGSGTD | VPDRFSG | ALQSG |
| | ADSVKG | EVTCVVVDVSHEDP | | LQMNSLRA | | FTLTISS | SGSGTDF | NSQES |
| | RFTISR | EVKFNWYVDGVEVH | | EDTAVYYC | | LQPEDFA | TLTISSL | VTEQD |
| | DNSKNT | NAKTKPREEQYNST | | ARDRPYYY | | TYYCQQY | QAEDVAV | SKDST |
| | LYLQMN | YRVVSVLTVLHQDW | | YMDVWGKG | | KSYPVTF | YYCQQYY | YSLSS |
| | SLRAED | LNGKEYKCKVSNKA | | TTVTVSS | | GQGTKVE | STPPTFG | TLTLS |
| | TAVYYC | LPAPIEKTISKAKG | | (SEQ ID | | IK (SEQ | QGTRLEI | KADYE |
| | ARGRGG | QPREPQVYTLPPSR | | NO: 591) | | ID NO: | K (SEQ | KHKVY |
| | SGWLDY | EEMTKNQVSLTCLV | | | | 592) | ID NO: | ACEVT |
| | WGQGTL | KGFYPSDIAVEWES | | | | | 1639) | HQGLS |
| | VTVSS | NGQPENNYKTTPPV | | | | | | SPVTK |
| | (SEQ | LDSDGSFFLYSKLT | | | | | | SFNRG |
| | ID NO: | VDKSRWQQGNVFSC | | | | | | EC |
| | 1438) | SVMHEALHNHYTQK | | | | | | (SEQ |
| | | SLSLSPG (SEQ | | | | | | ID |
| | | ID NO: 44) | | | | | | NO: |
| | | | | | | | | 45) |
| PMAB169 | EVQLLE | ASTKGPSVFPLAPS | GGGGSG | EVQLLESG | GGGGSG | DIQMTQS | DIVMTQS | RTVAA |
| | SGGGLV | SKSTSGGTAALGCL | GGGSGG | GGLVQPGG | GGGSGG | PSSLSAS | PDSLAVS | PSVFI |
| | QPGGSL | VKDYFPEPVTVSWN | GGS | SLRLSCAA | GGSGGG | VGDRVTI | LGERATI | FPPSD |
| | RLSCAA | SGALTSGVHTFPAV | (SEQ | SGFTFSDF | GS | TCRASQS | NCKSSQS | EQLKS |
| | SGFTFS | LQSSGLYSLSSVVT | ID NO: | WMHWVRQA | (SEQ | VSRSLAW | VLYSSNA | GTASV |
| | NSDMSW | VPSSSLGTQTYICN | 30) | PGKGLEWI | ID NO: | YQQKPGK | KNYLAWY | VCLLN |
| | VRQAPG | VNHKPSNTKVDKKV | | SYISGDSG | 22) | APKLLIY | QQKPGQP | NFYPR |
| | KGLEWV | EPKSCDKTHTCPPC | | YTNYADSV | | AASSLQS | PKLLIYW | EAKVQ |
| | SGITIS | PAPEAAGAPSVELE | | KGRFTISR | | GVPSRFS | ASTRESG | WKVDN |
| | GGSTYY | PPKPKDTLMISRTP | | DNSKNTLY | | GSGSGTD | VPDRFSG | ALQSG |
| | ADSVKG | EVTCVVVDVSHEDP | | LQMNSLRA | | FTLTISS | SGSGTDF | NSQES |
| | RFTISR | EVKFNWYVDGVEVH | | EDTAVYYC | | LQPEDFA | TLTISSL | VTEQD |
| | DNSKNT | NAKTKPREEQYNST | | ARDRPYYY | | TYYCQQY | QAEDVAV | SKDST |
| | LYLQMN | YRVVSVLTVLHQDW | | YMDVWGKG | | KSYPVTF | YYCQQYY | YSLSS |
| | SLRAED | LNGKEYKCKVSNKA | | TTVTVSS | | GQGTKVE | STPPTFG | TLTLS |
| | TAVYYC | LPAPIEKTISKAKG | | (SEQ ID | | IK (SEQ | QGTRLEI | KADYE |
| | ARGRGG | QPREPQVYTLPPSR | | NO: 591) | | ID NO: | K (SEQ | KHKVY |
| | SGWLDY | EEMTKNQVSLTCLV | | | | 592) | ID NO: | ACEVT |
| | WGQGTL | KGFYPSDIAVEWES | | | | | 1640) | HQGLS |
| | VTVSS | NGQPENNYKTTPPV | | | | | | SPVTK |
| | (SEQ | LDSDGSFFLYSKLT | | | | | | SFNRG |
| | ID NO: | VDKSRWQQGNVFSC | | | | | | EC |
| | 1438) | SVMHEALHNHYTQK | | | | | | (SEQ |
| | | SLSLSPG (SEQ | | | | | | ID |
| | | ID NO: 44) | | | | | | NO: |
| | | | | | | | | 45) |
| PMAB170 | EVQLLE | ASTKGPSVFPLAPS | GGGGSG | EVQLLESG | GGGGSG | DIQMTQS | DIVMTQS | RTVAA |
| | SGGGLV | SKSTSGGTAALGCL | GGGSGG | GGLVQPGG | GGGSGG | PSSLSAS | PDSLAVS | PSVFI |
| | QPGGSL | VKDYFPEPVTVSWN | GGS | SLRLSCAA | GGSGGG | VGDRVTI | LGERATI | FPPSD |
| | RLSCAA | SGALTSGVHTFPAV | (SEQ | SGFTFSDF | GS | TCRASQS | NCKSSQS | EQLKS |
| | SGFTFS | LQSSGLYSLSSVVT | ID NO: | WMHWVRQA | (SEQ | VSRSLAW | VLYSSNQ | GTASV |
| | NSDMSW | VPSSSLGTQTYICN | 30) | PGKGLEWI | ID NO: | YQQKPGK | RNYLAWY | VCLLN |
| | VRQAPG | VNHKPSNTKVDKKV | | SYISGDSG | 22) | APKLLIY | QQKPGQP | NFYPR |
| | KGLEWV | EPKSCDKTHTCPPC | | YTNYADSV | | AASSLQS | PKLLIYW | EAKVQ |
| | SGITIS | PAPEAAGAPSVELE | | KGRFTISR | | GVPSRFS | ASTRESG | WKVDN |
| | GGSTYY | PPKPKDTLMISRTP | | DNSKNTLY | | GSGSGTD | VPDRFSG | ALQSG |
| | ADSVKG | EVTCVVVDVSHEDP | | LQMNSLRA | | FTLTISS | SGSGTDF | NSQES |
| | RFTISR | EVKFNWYVDGVEVH | | EDTAVYYC | | LQPEDFA | TLTISSL | VTEQD |
| | DNSKNT | NAKTKPREEQYNST | | ARDRPYYY | | TYYCQQY | QAEDVAV | SKDST |
| | LYLQMN | YRVVSVLTVLHQDW | | YMDVWGKG | | KSYPVTF | YYCQQYY | YSLSS |
| | SLRAED | LNGKEYKCKVSNKA | | TTVTVSS | | GQGTKVE | STPPTFG | TLTLS |
| | TAVYYC | LPAPIEKTISKAKG | | (SEQ ID | | IK (SEQ | QGTRLEI | KADYE |
| | ARGRGG | QPREPQVYTLPPSR | | NO: 591) | | ID NO: | K (SEQ | KHKVY |
| | SGWLDY | EEMTKNQVSLTCLV | | | | 592) | ID NO: | ACEVT |
| | WGQGTL | KGFYPSDIAVEWES | | | | | 1641) | HQGLS |
| | VTVSS | NGQPENNYKTTPPV | | | | | | SPVTK |
| | (SEQ | LDSDGSFFLYSKLT | | | | | | SFNRG |
| | ID NO: | VDKSRWQQGNVFSC | | | | | | EC |
| | 1438) | SVMHEALHNHYTQK | | | | | | (SEQ |
| | | SLSLSPG (SEQ | | | | | | ID |
| | | ID NO: 44) | | | | | | NO: |
| | | | | | | | | 45) |
| PMAB171 | EVQLLE | ASTKGPSVFPLAPS | GGGGSG | EVQLLESG | GGGGSG | DIQMTQS | DIVMTQS | RTVAA |
| | SGGGLV | SKSTSGGTAALGCL | GGGSGG | GGLVQPGG | GGGSGG | PSSLSAS | PDSLAVS | PSVFI |
| | QPGGSL | VKDYFPEPVTVSWN | GGS | SLRLSCAA | GGSGGG | VGDRVTI | LGERATI | FPPSD |
| | RLSCAA | SGALTSGVHTFPAV | (SEQ | SGFTFSDF | GS | TCRASQS | NCKSSQS | EQLKS |
| | SGFTFS | LQSSGLYSLSSVVT | ID NO: | WMHWVRQA | (SEQ | VSRSLAW | VLYSSNQ | GTASV |
| | NSDMSW | VPSSSLGTQTYICN | 30) | PGKGLEWI | ID NO: | YQQKPGK | KNYLAWY | VCLLN |
| | VRQAPG | VNHKPSNTKVDKKV | | SYISGDSG | 22) | APKLLIY | QQKPGQP | NFYPR |
| | KGLEWV | EPKSCDKTHTCPPC | | YTNYADSV | | AASSLQS | PKLLIYW | EAKVQ |
| | SGITIS | PAPEAAGAPSVELE | | KGRFTISR | | GVPSRFS | ASTRESG | WKVDN |
| | GGSTYY | PPKPKDTLMISRTP | | DNSKNTLY | | GSGSGTD | VPDRFSG | ALQSG |
| | ADSVKG | EVTCVVVDVSHEDP | | LQMNSLRA | | FTLTISS | SGSGTDF | NSQES |
| | RFTISR | EVKFNWYVDGVEVH | | EDTAVYYC | | LQPEDFA | TLTISSL | VTEQD |
| | DNSKNT | NAKTKPREEQYNST | | ARDRPYYY | | TYYCQQY | QAEDVAV | SKDST |
| | LYLQMN | YRVVSVLTVLHQDW | | YMDVWGKG | | KSYPVTF | YYCQQYY | YSLSS |
| | SLRAED | LNGKEYKCKVSNKA | | TTVTVSS | | GQGTKVE | STPPTFG | TLTLS |
| | TAVYYC | LPAPIEKTISKAKG | | (SEQ ID | | IK (SEQ | QGTRLEI | KADYE |
| | ARGRGG | QPREPQVYTLPPSR | | NO: 591) | | ID NO: | K (SEQ | KHKVY |
| | SGWLDY | EEMTKNQVSLTCLV | | | | 592) | ID NO: | ACEVT |
| | WGQGTL | KGFYPSDIAVEWES | | | | | 1642) | HQGLS |
| | VTVSS | NGQPENNYKTTPPV | | | | | | SPVTK |
| | (SEQ | LDSDGSFFLYSKLT | | | | | | SFNRG |
| | ID NO: | VDKSRWQQGNVFSC | | | | | | EC |
| | 1438) | SVMHEALHNHYTQK | | | | | | (SEQ |
| | | SLSLSPG (SEQ | | | | | | ID |
| | | ID NO: 44) | | | | | | NO: |
| | | | | | | | | 45) |
| PMAB172 | EVQLLE | ASTKGPSVFPLAPS | GGGGSG | EVQLLESG | GGGGSG | DIQMTQS | DIVMTQS | RTVAA |
| | SGGGLV | SKSTSGGTAALGCL | GGGSGG | GGLVQPGG | GGGSGG | PSSLSAS | PDSLAVS | PSVFI |
| | QPGGSL | VKDYFPEPVTVSWN | GGS | SLRLSCAA | GGSGGG | VGDRVTI | LGERATI | FPPSD |
| | RLSCAA | SGALTSGVHTFPAV | (SEQ | SGFTFSDF | GS | TCRASQS | NCKSSQS | EQLKS |
| | SGFTFS | LQSSGLYSLSSVVT | ID NO: | WMHWVRQA | (SEQ | VSRSLAW | VLYSSNN | GTASV |
| | SYAMSW | VPSSSLGTQTYICN | 30) | PGKGLEWI | ID NO: | YQQKPGK | KNYLAWY | VCLLN |
| | VRQAPG | VNHKPSNTKVDKKV | | SYISGDSG | 22) | APKLLIY | QQKPGQP | NFYPR |
| | KGLEWV | EPKSCDKTHTCPPC | | YTNYADSV | | AASSLQS | PKLLIYW | EAKVQ |
| | SAISGS | PAPEAAGAPSVELE | | KGRFTISR | | GVPSRFS | ASTRESG | WKVDN |
| | GGSTYY | PPKPKDTLMISRTP | | DNSKNTLY | | GSGSGTD | VPDRFSG | ALQSG |
| | ADSVKG | EVTCVVVDVSHEDP | | LQMNSLRA | | FTLTISS | SGSGTDF | NSQES |
| | RFTISR | EVKFNWYVDGVEVH | | EDTAVYYC | | LQPEDFA | TLTISSL | VTEQD |
| | DNSKNT | NAKTKPREEQYNST | | ARDRPYYY | | TYYCQQY | QAEDVAV | SKDST |
| | LYLQMN | YRVVSVLTVLHQDW | | YMDVWGKG | | KSYPVTF | YYCQQYY | YSLSS |
| | SLRAED | LNGKEYKCKVSNKA | | TTVTVSS | | GQGTKVE | TTPPTFG | TLTLS |
| | TAVYYC | LPAPIEKTISKAKG | | (SEQ ID | | IK (SEQ | QGTRLEI | KADYE |
| | ARGRGG | QPREPQVYTLPPSR | | NO: 591) | | ID NO: | K (SEQ | KHKVY |
| | SGWLDY | EEMTKNQVSLTCLV | | | | 592) | ID NO: | ACEVT |
| | WGQGTL | KGFYPSDIAVEWES | | | | | 1614) | HQGLS |
| | VTVSS | NGQPENNYKTTPPV | | | | | | SPVTK |
| | (SEQ | LDSDGSFFLYSKLT | | | | | | SFNRG |
| | ID NO: | VDKSRWQQGNVFSC | | | | | | EC |
| | 1613) | SVMHEALHNHYTQK | | | | | | (SEQ |
| | | SLSLSPG (SEQ | | | | | | ID |
| | | ID NO: 44) | | | | | | NO: |
| | | | | | | | | 45) |
| PMAB173 | EVQLLE | ASTKGPSVFPLAPS | GGGGSG | EVQLLESG | GGGGSG | DIQMTQS | DIVMTQS | RTVAA |
| | SGGGLV | SKSTSGGTAALGCL | GGGSGG | GGLVQPGG | GGGSGG | PSSLSAS | PDSLAVS | PSVFI |
| | QPGGSL | VKDYFPEPVTVSWN | GGS | SLRLSCAA | GGSGGG | VGDRVTI | LGERATI | FPPSD |
| | RLSCAA | SGALTSGVHTFPAV | (SEQ | SGFTFSDF | GS | TCRASQS | NCKSSQS | EQLKS |
| | SGFTFS | LQSSGLYSLSSVVT | ID NO: | WMHWVRQA | (SEQ | VSRSLAW | VLYSPNN | GTASV |
| | SYAMSW | VPSSSLGTQTYICN | 30) | PGKGLEWI | ID NO: | YQQKPGK | KNYLAWY | VCLLN |
| | VRQAPG | VNHKPSNTKVDKKV | | SYISGDSG | 22) | APKLLIY | QQKPGQP | NFYPR |
| | KGLEWV | EPKSCDKTHTCPPC | | YTNYADSV | | AASSLQS | PKLLIYW | EAKVQ |
| | SAISGS | PAPEAAGAPSVELE | | KGRFTISR | | GVPSRFS | ASTRESG | WKVDN |
| | GGSTYY | PPKPKDTLMISRTP | | DNSKNTLY | | GSGSGTD | VPDRFSG | ALQSG |
| | ADSVKG | EVTCVVVDVSHEDP | | LQMNSLRA | | FTLTISS | SGSGTDF | NSQES |
| | RFTISR | EVKFNWYVDGVEVH | | EDTAVYYC | | LQPEDFA | TLTISSL | VTEQD |
| | DNSKNT | NAKTKPREEQYNST | | ARDRPYYY | | TYYCQQY | QAEDVAV | SKDST |
| | LYLQMN | YRVVSVLTVLHQDW | | YMDVWGKG | | KSYPVTF | YYCQQYY | YSLSS |
| | SLRAED | LNGKEYKCKVSNKA | | TTVTVSS | | GQGTKVE | STPPTFG | TLTLS |
| | TAVYYC | LPAPIEKTISKAKG | | (SEQ ID | | IK (SEQ | QGTRLEI | KADYE |
| | ARGRGG | QPREPQVYTLPPSR | | NO: 591) | | ID NO: | K (SEQ | KHKVY |
| | SGWLDY | EEMTKNQVSLTCLV | | | | 592) | ID NO: | ACEVT |
| | WGQGTL | KGFYPSDIAVEWES | | | | | 1615) | HQGLS |
| | VTVSS | NGQPENNYKTTPPV | | | | | | SPVTK |
| | (SEQ | LDSDGSFFLYSKLT | | | | | | SFNRG |
| | ID NO: | VDKSRWQQGNVFSC | | | | | | EC |
| | 1613) | SVMHEALHNHYTQK | | | | | | (SEQ |
| | | SLSLSPG (SEQ | | | | | | ID |
| | | ID NO: 44) | | | | | | NO: |
| | | | | | | | | 45) |
| PMAB174 | EVQLLE | ASTKGPSVFPLAPS | GGGGSG | EVQLLESG | GGGGSG | DIQMTQS | DIVMTQS | RTVAA |
| | SGGGLV | SKSTSGGTAALGCL | GGGSGG | GGLVQPGG | GGGSGG | PSSLSAS | PDSLAVS | PSVFI |
| | QPGGSL | VKDYFPEPVTVSWN | GGS | SLRLSCAA | GGSGGG | VGDRVTI | LGERATI | FPPSD |
| | RLSCAA | SGALTSGVHTFPAV | (SEQ | SGFTFSDF | GS | TCRASQS | NCKSSQS | EQLKS |
| | SGFTFS | LQSSGLYSLSSVVT | ID NO: | WMHWVRQA | (SEQ | VSRSLAW | VLYSSNN | GTASV |
| | SYAMSW | VPSSSLGTQTYICN | 30) | PGKGLEWI | ID NO: | YQQKPGK | KNYLAWY | VCLLN |
| | VRQAPG | VNHKPSNTKVDKKV | | SYISGDSG | 22) | APKLLIY | QQKPGQP | NFYPR |
| | KGLEWV | EPKSCDKTHTCPPC | | YTNYADSV | | AASSLQS | PKLLIYW | EAKVQ |
| | SAISGS | PAPEAAGAPSVELE | | KGRFTISR | | GVPSRFS | ASTRESG | WKVDN |
| | GGSTYY | PPKPKDTLMISRTP | | DNSKNTLY | | GSGSGTD | VPDRFSG | ALQSG |
| | ADSVKG | EVTCVVVDVSHEDP | | LQMNSLRA | | FTLTISS | SGSGTDF | NSQES |
| | RFTISR | EVKFNWYVDGVEVH | | EDTAVYYC | | LQPEDFA | TLTISSL | VTEQD |
| | DNSKNT | NAKTKPREEQYNST | | ARDRPYYY | | TYYCQQY | QAEDVAV | SKDST |
| | LYLQMN | YRVVSVLTVLHQDW | | YMDVWGKG | | KSYPVTF | YYCQQYY | YSLSS |
| | SLRAED | LNGKEYKCKVSNKA | | TTVTVSS | | GQGTKVE | STPPTFG | TLTLS |
| | TAVYYC | LPAPIEKTISKAKG | | (SEQ ID | | IK (SEQ | QGTRLEI | KADYE |
| | ARGRGG | QPREPQVYTLPPSR | | NO: 591) | | ID NO: | K (SEQ | KHKVY |
| | SGWLDY | EEMTKNQVSLTCLV | | | | 592) | ID NO: | ACEVT |
| | WGQGTL | KGFYPSDIAVEWES | | | | | 598) | HQGLS |
| | VTVSS | NGQPENNYKTTPPV | | | | | | SPVTK |
| | (SEQ | LDSDGSFFLYSKLT | | | | | | SFNRG |
| | ID NO: | VDKSRWQQGNVFSC | | | | | | EC |
| | 1613) | SVMHEALHNHYTQK | | | | | | (SEQ |
| | | SLSLSPG (SEQ | | | | | | ID |
| | | ID NO: 44) | | | | | | NO: |
| | | | | | | | | 45) |
| PMAB175 | EVQLLE | ASTKGPSVFPLAPS | GGGGSG | EVQLLESG | GGGGSG | DIQMTQS | DIVMTQS | RTVAA |
| | SGGGLV | SKSTSGGTAALGCL | GGGSGG | GGLVQPGG | GGGSGG | PSSLSAS | PDSLAVS | PSVFI |
| | QPGGSL | VKDYFPEPVTVSWN | GGS | SLRLSCAA | GGSGGG | VGDRVTI | LGERATI | FPPSD |
| | RLSCAA | SGALTSGVHTFPAV | (SEQ | SGFTFSDF | GS | TCRASQS | NCKSSQS | EQLKS |
| | SGFTFS | LQSSGLYSLSSVVT | ID NO: | WMHWVRQA | (SEQ | VSRSLAW | VLYSPNN | GTASV |
| | SYDMSW | VPSSSLGTQTYICN | 30) | PGKGLEWI | ID NO: | YQQKPGK | KNYLAWY | VCLLN |
| | VRQAPG | VNHKPSNTKVDKKV | | SYISGDSG | 22) | APKLLIY | QQKPGQP | NFYPR |
| | KGLEWV | EPKSCDKTHTCPPC | | YTNYADSV | | AASSLQS | PKLLIYW | EAKVQ |
| | SGITIS | PAPEAAGAPSVELE | | KGRFTISR | | GVPSRFS | ASTRESG | WKVDN |
| | GGSTYY | PPKPKDTLMISRTP | | DNSKNTLY | | GSGSGTD | VPDRFSG | ALQSG |
| | ADSVKG | EVTCVVVDVSHEDP | | LQMNSLRA | | FTLTISS | SGSGTDF | NSQES |
| | RFTISR | EVKFNWYVDGVEVH | | EDTAVYYC | | LQPEDFA | TLTISSL | VTEQD |
| | DNSKNT | NAKTKPREEQYNST | | ARDRPYYY | | TYYCQQY | QAEDVAV | SKDST |
| | LYLQMN | YRVVSVLTVLHQDW | | YMDVWGKG | | KSYPVTF | YYCQQYY | YSLSS |
| | SLRAED | LNGKEYKCKVSNKA | | TTVTVSS | | GQGTKVE | TTPPTFG | TLTLS |
| | TAVYYC | LPAPIEKTISKAKG | | (SEQ ID | | IK (SEQ | QGTRLEI | KADYE |
| | ARGRGG | QPREPQVYTLPPSR | | NO: 591) | | ID NO: | K (SEQ | KHKVY |
| | SGWLDY | EEMTKNQVSLTCLV | | | | 592) | ID NO: | ACEVT |
| | WGQGTL | KGFYPSDIAVEWES | | | | | 1359) | HQGLS |
| | VTVSS | NGQPENNYKTTPPV | | | | | | SPVTK |
| | (SEQ | LDSDGSFFLYSKLT | | | | | | SFNRG |
| | ID NO: | VDKSRWQQGNVFSC | | | | | | EC |
| | 1643) | SVMHEALHNHYTQK | | | | | | (SEQ |
| | | SLSLSPG (SEQ | | | | | | ID |
| | | ID NO: 44) | | | | | | NO: |
| | | | | | | | | 45) |
| PMAB176 | EVQLLE | ASTKGPSVFPLAPS | GGGGSG | EVQLLESG | GGGGSG | DIQMTQS | DIVMTQS | RTVAA |
| | SGGGLV | SKSTSGGTAALGCL | GGGSGG | GGLVQPGG | GGGSGG | PSSLSAS | PDSLAVS | PSVFI |
| | QPGGSL | VKDYFPEPVTVSWN | GGS | SLRLSCAA | GGSGGG | VGDRVTI | LGERATI | FPPSD |
| | RLSCAA | SGALTSGVHTFPAV | (SEQ | SGFTFSDF | GS | TCRASQS | NCKSSQS | EQLKS |
| | SGFTFS | LQSSGLYSLSSVVT | ID NO: | WMHWVRQA | (SEQ | VSRSLAW | VLYSPNN | GTASV |
| | SYDMSW | VPSSSLGTQTYICN | 30) | PGKGLEWI | ID NO: | YQQKPGK | KNYLAWY | VCLLN |
| | VRQAPG | VNHKPSNTKVDKKV | | SYISGDSG | 22) | APKLLIY | QQKPGQP | NFYPR |
| | KGLEWV | EPKSCDKTHTCPPC | | YTNYADSV | | AASSLQS | PKLLIYW | EAKVQ |
| | SAITIS | PAPEAAGAPSVELE | | KGRFTISR | | GVPSRFS | ASTRESG | WKVDN |
| | GGSTYY | PPKPKDTLMISRTP | | DNSKNTLY | | GSGSGTD | VPDRFSG | ALQSG |
| | ADSVKG | EVTCVVVDVSHEDP | | LQMNSLRA | | FTLTISS | SGSGTDF | NSQES |
| | RFTISR | EVKFNWYVDGVEVH | | EDTAVYYC | | LQPEDFA | TLTISSL | VTEQD |
| | DNSKNT | NAKTKPREEQYNST | | ARDRPYYY | | TYYCQQY | QAEDVAV | SKDST |
| | LYLQMN | YRVVSVLTVLHQDW | | YMDVWGKG | | KSYPVTF | YYCQQYY | YSLSS |
| | SLRAED | LNGKEYKCKVSNKA | | TTVTVSS | | GQGTKVE | TTPPTFG | TLTLS |
| | TAVYYC | LPAPIEKTISKAKG | | (SEQ ID | | IK (SEQ | QGTRLEI | KADYE |
| | ARGRGG | QPREPQVYTLPPSR | | NO: 591) | | ID NO: | K (SEQ | KHKVY |
| | SGWLDY | EEMTKNQVSLTCLV | | | | 592) | ID NO: | ACEVT |
| | WGQGTL | KGFYPSDIAVEWES | | | | | 1359) | HQGLS |
| | VTVSS | NGQPENNYKTTPPV | | | | | | SPVTK |
| | (SEQ | LDSDGSFFLYSKLT | | | | | | SFNRG |
| | ID NO: | VDKSRWQQGNVFSC | | | | | | EC |
| | 1644) | SVMHEALHNHYTQK | | | | | | (SEQ |
| | | SLSLSPG (SEQ | | | | | | ID |
| | | ID NO: 44) | | | | | | NO: |
| | | | | | | | | 45) |
| PMAB177 | EVQLLE | ASTKGPSVFPLAPS | GGGGSG | EVQLLESG | GGGGSG | DIQMTQS | DIVMTQS | RTVAA |
| | SGGGLV | SKSTSGGTAALGCL | GGGSGG | GGLVQPGG | GGGSGG | PSSLSAS | PDSLAVS | PSVFI |
| | QPGGSL | VKDYFPEPVTVSWN | GGS | SLRLSCAA | GGSGGG | VGDRVTI | LGERATI | FPPSD |
| | RLSCAA | SGALTSGVHTFPAV | (SEQ | SGFTFSDF | GS | TCRASQS | NCKSSQS | EQLKS |
| | SGFTFS | LQSSGLYSLSSVVT | ID NO: | WMHWVRQA | (SEQ | VSRSLAW | VLYSPNN | GTASV |
| | SYDMSW | VPSSSLGTQTYICN | 30) | PGKGLEWI | ID NO: | YQQKPGK | KNYLAWY | VCLLN |
| | VRQAPG | VNHKPSNTKVDKKV | | SYISGDSG | 22) | APKLLIY | QQKPGQP | NFYPR |
| | KGLEWV | EPKSCDKTHTCPPC | | YTNYADSV | | AASSLQS | PKLLIYW | EAKVQ |
| | SGISIS | PAPEAAGAPSVELE | | KGRFTISR | | GVPSRFS | ASTRESG | WKVDN |
| | GGSTYY | PPKPKDTLMISRTP | | DNSKNTLY | | GSGSGTD | VPDRFSG | ALQSG |
| | ADSVKG | EVTCVVVDVSHEDP | | LQMNSLRA | | FTLTISS | SGSGTDF | NSQES |
| | RFTISR | EVKFNWYVDGVEVH | | EDTAVYYC | | LQPEDFA | TLTISSL | VTEQD |
| | DNSKNT | NAKTKPREEQYNST | | ARDRPYYY | | TYYCQQY | QAEDVAV | SKDST |
| | LYLQMN | YRVVSVLTVLHQDW | | YMDVWGKG | | KSYPVTF | YYCQQYY | YSLSS |
| | SLRAED | LNGKEYKCKVSNKA | | TTVTVSS | | GQGTKVE | TTPPTFG | TLTLS |
| | TAVYYC | LPAPIEKTISKAKG | | (SEQ ID | | IK (SEQ | QGTRLEI | KADYE |
| | ARGRGG | QPREPQVYTLPPSR | | NO: 591) | | ID NO: | K (SEQ | KHKVY |
| | SGWLDY | EEMTKNQVSLTCLV | | | | 592) | ID NO: | ACEVT |
| | WGQGTL | KGFYPSDIAVEWES | | | | | 1359) | HQGLS |
| | VTVSS | NGQPENNYKTTPPV | | | | | | SPVTK |
| | (SEQ | LDSDGSFFLYSKLT | | | | | | SFNRG |
| | ID NO: | VDKSRWQQGNVFSC | | | | | | EC |
| | 1645) | SVMHEALHNHYTQK | | | | | | (SEQ |
| | | SLSLSPG (SEQ | | | | | | ID |
| | | ID NO: 44) | | | | | | NO: |
| | | | | | | | | 45) |
| PMAB178 | EVQLLE | ASTKGPSVFPLAPS | GGGGSG | EVQLLESG | GGGGSG | DIQMTQS | DIVMTQS | RTVAA |
| | SGGGLV | SKSTSGGTAALGCL | GGGSGG | GGLVQPGG | GGGSGG | PSSLSAS | PDSLAVS | PSVFI |
| | QPGGSL | VKDYFPEPVTVSWN | GGS | SLRLSCAA | GGSGGG | VGDRVTI | LGERATI | FPPSD |
| | RLSCAA | SGALTSGVHTFPAV | (SEQ | SGFTFSDF | GS | TCRASQS | NCKSSQS | EQLKS |
| | SGFTFS | LQSSGLYSLSSVVT | ID NO: | WMHWVRQA | (SEQ | VSRSLAW | VLYSPNN | GTASV |
| | SYDMSW | VPSSSLGTQTYICN | 30) | PGKGLEWI | ID NO: | YQQKPGK | KNYLAWY | VCLLN |
| | VRQAPG | VNHKPSNTKVDKKV | | SYISGDSG | 22) | APKLLIY | QQKPGQP | NFYPR |
| | KGLEWV | EPKSCDKTHTCPPC | | YTNYADSV | | AASSLQS | PKLLIYW | EAKVQ |
| | SGITGS | PAPEAAGAPSVELE | | KGRFTISR | | GVPSRFS | ASTRESG | WKVDN |
| | GGSTYY | PPKPKDTLMISRTP | | DNSKNTLY | | GSGSGTD | VPDRFSG | ALQSG |
| | ADSVKG | EVTCVVVDVSHEDP | | LQMNSLRA | | FTLTISS | SGSGTDF | NSQES |
| | RFTISR | EVKFNWYVDGVEVH | | EDTAVYYC | | LQPEDFA | TLTISSL | VTEQD |
| | DNSKNT | NAKTKPREEQYNST | | ARDRPYYY | | TYYCQQY | QAEDVAV | SKDST |
| | LYLQMN | YRVVSVLTVLHQDW | | YMDVWGKG | | KSYPVTF | YYCQQYY | YSLSS |
| | SLRAED | LNGKEYKCKVSNKA | | TTVTVSS | | GQGTKVE | TTPPTFG | TLTLS |
| | TAVYYC | LPAPIEKTISKAKG | | (SEQ ID | | IK (SEQ | QGTRLEI | KADYE |
| | ARGRGG | QPREPQVYTLPPSR | | NO: 591) | | ID NO: | K (SEQ | KHKVY |
| | SGWLDY | EEMTKNQVSLTCLV | | | | 592) | ID NO: | ACEVT |
| | WGQGTL | KGFYPSDIAVEWES | | | | | 1359) | HQGLS |
| | VTVSS | NGQPENNYKTTPPV | | | | | | SPVTK |
| | (SEQ | LDSDGSFFLYSKLT | | | | | | SFNRG |
| | ID NO: | VDKSRWQQGNVFSC | | | | | | EC |
| | 1646) | SVMHEALHNHYTQK | | | | | | (SEQ |
| | | SLSLSPG (SEQ | | | | | | ID |
| | | ID NO: 44) | | | | | | NO: |
| | | | | | | | | 45) |
| PMAB179 | EVQLLE | ASTKGPSVFPLAPS | GGGGSG | EVQLLESG | GGGGSG | DIQMTQS | DIVMTQS | RTVAA |
| | SGGGLV | SKSTSGGTAALGCL | GGGSGG | GGLVQPGG | GGGSGG | PSSLSAS | PDSLAVS | PSVFI |
| | QPGGSL | VKDYFPEPVTVSWN | GGS | SLRLSCAA | GGSGGG | VGDRVTI | LGERATI | FPPSD |
| | RLSCAA | SGALTSGVHTFPAV | (SEQ | SGFTFSDF | GS | TCRASQS | NCKSSQS | EQLKS |
| | SGFTFS | LQSSGLYSLSSVVT | ID NO: | WMHWVRQA | (SEQ | VSRSLAW | VLYSPNN | GTASV |
| | SYDMSW | VPSSSLGTQTYICN | 30) | PGKGLEWI | ID NO: | YQQKPGK | KNYLAWY | VCLLN |
| | VRQAPG | VNHKPSNTKVDKKV | | SYISGDSG | 22) | APKLLIY | QQKPGQP | NFYPR |
| | KGLEWV | EPKSCDKTHTCPPC | | YTNYADSV | | AASSLQS | PKLLIYW | EAKVQ |
| | SAISIS | PAPEAAGAPSVELE | | KGRFTISR | | GVPSRFS | ASTRESG | WKVDN |
| | GGSTYY | PPKPKDTLMISRTP | | DNSKNTLY | | GSGSGTD | VPDRFSG | ALQSG |
| | ADSVKG | EVTCVVVDVSHEDP | | LQMNSLRA | | FTLTISS | SGSGTDF | NSQES |
| | RFTISR | EVKFNWYVDGVEVH | | EDTAVYYC | | LQPEDFA | TLTISSL | VTEQD |
| | DNSKNT | NAKTKPREEQYNST | | ARDRPYYY | | TYYCQQY | QAEDVAV | SKDST |
| | LYLQMN | YRVVSVLTVLHQDW | | YMDVWGKG | | KSYPVTF | YYCQQYY | YSLSS |
| | SLRAED | LNGKEYKCKVSNKA | | TTVTVSS | | GQGTKVE | TTPPTFG | TLTLS |
| | TAVYYC | LPAPIEKTISKAKG | | (SEQ ID | | IK (SEQ | QGTRLEI | KADYE |
| | ARGRGG | QPREPQVYTLPPSR | | NO: 591) | | ID NO: | K (SEQ | KHKVY |
| | SGWLDY | EEMTKNQVSLTCLV | | | | 592) | ID NO: | ACEVT |
| | WGQGTL | KGFYPSDIAVEWES | | | | | 1359) | HQGLS |
| | VTVSS | NGQPENNYKTTPPV | | | | | | SPVTK |
| | (SEQ | LDSDGSFFLYSKLT | | | | | | SFNRG |
| | ID NO: | VDKSRWQQGNVFSC | | | | | | EC |
| | 1647) | SVMHEALHNHYTQK | | | | | | (SEQ |
| | | SLSLSPG (SEQ | | | | | | ID |
| | | ID NO: 44) | | | | | | NO: |
| | | | | | | | | 45) |
| PMAB180 | EVQLLE | ASTKGPSVFPLAPS | GGGGSG | EVQLLESG | GGGGSG | DIQMTQS | DIVMTQS | RTVAA |
| | SGGGLV | SKSTSGGTAALGCL | GGGSGG | GGLVQPGG | GGGSGG | PSSLSAS | PDSLAVS | PSVFI |
| | QPGGSL | VKDYFPEPVTVSWN | GGS | SLRLSCAA | GGSGGG | VGDRVTI | LGERATI | FPPSD |
| | RLSCAA | SGALTSGVHTFPAV | (SEQ | SGFTFSDF | GS | TCRASQS | NCKSSQS | EQLKS |
| | SGFTFS | LQSSGLYSLSSVVT | ID NO: | WMHWVRQA | (SEQ | VSRSLAW | VLYSPNN | GTASV |
| | SYDMSW | VPSSSLGTQTYICN | 30) | PGKGLEWI | ID NO: | YQQKPGK | KNYLAWY | VCLLN |
| | VRQAPG | VNHKPSNTKVDKKV | | SYISGDSG | 22) | APKLLIY | QQKPGQP | NFYPR |
| | KGLEWV | EPKSCDKTHTCPPC | | YTNYADSV | | AASSLQS | PKLLIYW | EAKVQ |
| | SAITGS | PAPEAAGAPSVELE | | KGRFTISR | | GVPSRFS | ASTRESG | WKVDN |
| | GGSTYY | PPKPKDTLMISRTP | | DNSKNTLY | | GSGSGTD | VPDRFSG | ALQSG |
| | ADSVKG | EVTCVVVDVSHEDP | | LQMNSLRA | | FTLTISS | SGSGTDF | NSQES |
| | RFTISR | EVKFNWYVDGVEVH | | EDTAVYYC | | LQPEDFA | TLTISSL | VTEQD |
| | DNSKNT | NAKTKPREEQYNST | | ARDRPYYY | | TYYCQQY | QAEDVAV | SKDST |
| | LYLQMN | YRVVSVLTVLHQDW | | YMDVWGKG | | KSYPVTF | YYCQQYY | YSLSS |
| | SLRAED | LNGKEYKCKVSNKA | | TTVTVSS | | GQGTKVE | TTPPTFG | TLTLS |
| | TAVYYC | LPAPIEKTISKAKG | | (SEQ ID | | IK (SEQ | QGTRLEI | KADYE |
| | ARGRGG | QPREPQVYTLPPSR | | NO: 591) | | ID NO: | K (SEQ | KHKVY |
| | SGWLDY | EEMTKNQVSLTCLV | | | | 592) | ID NO: | ACEVT |
| | WGQGTL | KGFYPSDIAVEWES | | | | | 1359) | HQGLS |
| | VTVSS | NGQPENNYKTTPPV | | | | | | SPVTK |
| | (SEQ | LDSDGSFFLYSKLT | | | | | | SFNRG |
| | ID NO: | VDKSRWQQGNVFSC | | | | | | EC |
| | 1648) | SVMHEALHNHYTQK | | | | | | (SEQ |
| | | SLSLSPG (SEQ | | | | | | ID |
| | | ID NO: 44) | | | | | | NO: |
| | | | | | | | | 45) |
| PMAB181 | EVQLLE | ASTKGPSVFPLAPS | GGGGSG | EVQLLESG | GGGGSG | DIQMTQS | DIVMTQS | RTVAA |
| | SGGGLV | SKSTSGGTAALGCL | GGGSGG | GGLVQPGG | GGGSGG | PSSLSAS | PDSLAVS | PSVFI |
| | QPGGSL | VKDYFPEPVTVSWN | GGS | SLRLSCAA | GGSGGG | VGDRVTI | LGERATI | FPPSD |
| | RLSCAA | SGALTSGVHTFPAV | (SEQ | SGFTFSDF | GS | TCRASQS | NCKSSQS | EQLKS |
| | SGFTFS | LQSSGLYSLSSVVT | ID NO: | WMHWVRQA | (SEQ | VSRSLAW | VLYSPNN | GTASV |
| | SYDMSW | VPSSSLGTQTYICN | 30) | PGKGLEWI | ID NO: | YQQKPGK | KNYLAWY | VCLLN |
| | VRQAPG | VNHKPSNTKVDKKV | | SYISGDSG | 22) | APKLLIY | QQKPGQP | NFYPR |
| | KGLEWV | EPKSCDKTHTCPPC | | YTNYADSV | | AASSLQS | PKLLIYW | EAKVQ |
| | SGISGS | PAPEAAGAPSVELE | | KGRFTISR | | GVPSRFS | ASTRESG | WKVDN |
| | GGSTYY | PPKPKDTLMISRTP | | DNSKNTLY | | GSGSGTD | VPDRFSG | ALQSG |
| | ADSVKG | EVTCVVVDVSHEDP | | LQMNSLRA | | FTLTISS | SGSGTDF | NSQES |
| | RFTISR | EVKFNWYVDGVEVH | | EDTAVYYC | | LQPEDFA | TLTISSL | VTEQD |
| | DNSKNT | NAKTKPREEQYNST | | ARDRPYYY | | TYYCQQY | QAEDVAV | SKDST |
| | LYLQMN | YRVVSVLTVLHQDW | | YMDVWGKG | | KSYPVTF | YYCQQYY | YSLSS |
| | SLRAED | LNGKEYKCKVSNKA | | TTVTVSS | | GQGTKVE | TTPPTFG | TLTLS |
| | TAVYYC | LPAPIEKTISKAKG | | (SEQ ID | | IK (SEQ | QGTRLEI | KADYE |
| | ARGRGG | QPREPQVYTLPPSR | | NO: 591) | | ID NO: | K (SEQ | KHKVY |
| | SGWLDY | EEMTKNQVSLTCLV | | | | 592) | ID NO: | ACEVT |
| | WGQGTL | KGFYPSDIAVEWES | | | | | 1359) | HQGLS |
| | VTVSS | NGQPENNYKTTPPV | | | | | | SPVTK |
| | (SEQ | LDSDGSFFLYSKLT | | | | | | SFNRG |
| | ID NO: | VDKSRWQQGNVFSC | | | | | | EC |
| | 1649) | SVMHEALHNHYTQK | | | | | | (SEQ |
| | | SLSLSPG (SEQ | | | | | | ID |
| | | ID NO: 44) | | | | | | NO: |
| | | | | | | | | 45) |
| PMAB182 | EVQLLE | ASTKGPSVFPLAPS | GGGGSG | EVQLLESG | GGGGSG | DIQMTQS | DIVMTQS | RTVAA |
| | SGGGLV | SKSTSGGTAALGCL | GGGSGG | GGLVQPGG | GGGSGG | PSSLSAS | PDSLAVS | PSVFI |
| | QPGGSL | VKDYFPEPVTVSWN | GGS | SLRLSCAA | GGSGGG | VGDRVTI | LGERATI | FPPSD |
| | RLSCAA | SGALTSGVHTFPAV | (SEQ | SGFTFSDF | GS | TCRASQS | NCKSSQS | EQLKS |
| | SGFTFS | LQSSGLYSLSSVVT | ID NO: | WMHWVRQA | (SEQ | VSRSLAW | VLYSPNN | GTASV |
| | SYAMSW | VPSSSLGTQTYICN | 30) | PGKGLEWI | ID NO: | YQQKPGK | KNYLAWY | VCLLN |
| | VRQAPG | VNHKPSNTKVDKKV | | SYISGDSG | 22) | APKLLIY | QQKPGQP | NFYPR |
| | KGLEWV | EPKSCDKTHTCPPC | | YTNYADSV | | AASSLQS | PKLLIYW | EAKVQ |
| | SGISGS | PAPEAAGAPSVELE | | KGRFTISR | | GVPSRFS | ASTRESG | WKVDN |
| | GGSTYY | PPKPKDTLMISRTP | | DNSKNTLY | | GSGSGTD | VPDRFSG | ALQSG |
| | ADSVKG | EVTCVVVDVSHEDP | | LQMNSLRA | | FTLTISS | SGSGTDF | NSQES |
| | RFTISR | EVKFNWYVDGVEVH | | EDTAVYYC | | LQPEDFA | TLTISSL | VTEQD |
| | DNSKNT | NAKTKPREEQYNST | | ARDRPYYY | | TYYCQQY | QAEDVAV | SKDST |
| | LYLQMN | YRVVSVLTVLHQDW | | YMDVWGKG | | KSYPVTF | YYCQQYY | YSLSS |
| | SLRAED | LNGKEYKCKVSNKA | | TTVTVSS | | GQGTKVE | TTPPTFG | TLTLS |
| | TAVYYC | LPAPIEKTISKAKG | | (SEQ ID | | IK (SEQ | QGTRLEI | KADYE |
| | ARGRGG | QPREPQVYTLPPSR | | NO: 591) | | ID NO: | K (SEQ | KHKVY |
| | SGWLDY | EEMTKNQVSLTCLV | | | | 592) | ID NO: | ACEVT |
| | WGQGTL | KGFYPSDIAVEWES | | | | | 1359) | HQGLS |
| | VTVSS | NGQPENNYKTTPPV | | | | | | SPVTK |
| | (SEQ | LDSDGSFFLYSKLT | | | | | | SFNRG |
| | ID NO: | VDKSRWQQGNVFSC | | | | | | EC |
| | 1650) | SVMHEALHNHYTQK | | | | | | (SEQ |
| | | SLSLSPG (SEQ | | | | | | ID |
| | | ID NO: 44) | | | | | | NO: |
| | | | | | | | | 45) |
| PMAB183 | EVQLLE | ASTKGPSVFPLAPS | GGGGSG | EVQLLESG | GGGGSG | DIQMTQS | DIVMTQS | RTVAA |
| | SGGGLV | SKSTSGGTAALGCL | GGGSGG | GGLVQPGG | GGGSGG | PSSLSAS | PDSLAVS | PSVFI |
| | QPGGSL | VKDYFPEPVTVSWN | GGS | SLRLSCAA | GGSGGG | VGDRVTI | LGERATI | FPPSD |
| | RLSCAA | SGALTSGVHTFPAV | (SEQ | SGFTFSDF | GS | TCRASQS | NCKSSQS | EQLKS |
| | SGFTFS | LQSSGLYSLSSVVT | ID NO: | WMHWVRQA | (SEQ | VSRSLAW | VLYSPNN | GTASV |
| | NSDMSW | VPSSSLGTQTYICN | 30) | PGKGLEWI | ID NO: | YQQKPGK | KNYLAWY | VCLLN |
| | VRQAPG | VNHKPSNTKVDKKV | | SYISGDSG | 22) | APKLLIY | QQKPGQP | NFYPR |
| | KGLEWV | EPKSCDKTHTCPPC | | YTNYADSV | | AASSLQS | PKLLIYW | EAKVQ |
| | SAISGS | PAPEAAGAPSVELE | | KGRFTISR | | GVPSRFS | ASTRESG | WKVDN |
| | GGSTYY | PPKPKDTLMISRTP | | DNSKNTLY | | GSGSGTD | VPDRFSG | ALQSG |
| | ADSVKG | EVTCVVVDVSHEDP | | LQMNSLRA | | FTLTISS | SGSGTDF | NSQES |
| | RFTISR | EVKFNWYVDGVEVH | | EDTAVYYC | | LQPEDFA | TLTISSL | VTEQD |
| | DNSKNT | NAKTKPREEQYNST | | ARDRPYYY | | TYYCQQY | QAEDVAV | SKDST |
| | LYLQMN | YRVVSVLTVLHQDW | | YMDVWGKG | | KSYPVTF | YYCQQYY | YSLSS |
| | SLRAED | LNGKEYKCKVSNKA | | TTVTVSS | | GQGTKVE | TTPPTFG | TLTLS |
| | TAVYYC | LPAPIEKTISKAKG | | (SEQ ID | | IK (SEQ | QGTRLEI | KADYE |
| | ARGRGG | QPREPQVYTLPPSR | | NO: 591) | | ID NO: | K (SEQ | KHKVY |
| | SGWLDY | EEMTKNQVSLTCLV | | | | 592) | ID NO: | ACEVT |
| | WGQGTL | KGFYPSDIAVEWES | | | | | 1359) | HQGLS |
| | VTVSS | NGQPENNYKTTPPV | | | | | | SPVTK |
| | (SEQ | LDSDGSFFLYSKLT | | | | | | SFNRG |
| | ID NO: | VDKSRWQQGNVFSC | | | | | | EC |
| | 1651) | SVMHEALHNHYTQK | | | | | | (SEQ |
| | | SLSLSPG (SEQ | | | | | | ID |
| | | ID NO: 44) | | | | | | NO: |
| | | | | | | | | 45) |
| PMAB184 | EVQLLE | ASTKGPSVFPLAPS | GGGGSG | EVQLLESG | GGGGSG | DIQMTQS | DIVMTQS | RTVAA |
| | SGGGLV | SKSTSGGTAALGCL | GGGSGG | GGLVQPGG | GGGSGG | PSSLSAS | PDSLAVS | PSVFI |
| | QPGGSL | VKDYFPEPVTVSWN | GGS | SLRLSCAA | GGSGGG | VGDRVTI | LGERATI | FPPSD |
| | RLSCAA | SGALTSGVHTFPAV | (SEQ | SGFTFSDF | GS | TCRASQS | NCKSSQS | EQLKS |
| | SGFTFS | LQSSGLYSLSSVVT | ID NO: | WMHWVRQA | (SEQ | VSRSLAW | VLYSPNN | GTASV |
| | SYDMSW | VPSSSLGTQTYICN | 30) | PGKGLEWI | ID NO: | YQQKPGK | KNYLAWY | VCLLN |
| | VRQAPG | VNHKPSNTKVDKKV | | SYISGDSG | 22) | APKLLIY | QQKPGQP | NFYPR |
| | KGLEWV | EPKSCDKTHTCPPC | | YTNYADSV | | AASSLQS | PKLLIYW | EAKVQ |
| | SAISGS | PAPEAAGAPSVELE | | KGRFTISR | | GVPSRFS | ASTRESG | WKVDN |
| | GGSTYY | PPKPKDTLMISRTP | | DNSKNTLY | | GSGSGTD | VPDRFSG | ALQSG |
| | ADSVKG | EVTCVVVDVSHEDP | | LQMNSLRA | | FTLTISS | SGSGTDF | NSQES |
| | RFTISR | EVKFNWYVDGVEVH | | EDTAVYYC | | LQPEDFA | TLTISSL | VTEQD |
| | DNSKNT | NAKTKPREEQYNST | | ARDRPYYY | | TYYCQQY | QAEDVAV | SKDST |
| | LYLQMN | YRVVSVLTVLHQDW | | YMDVWGKG | | KSYPVTF | YYCQQYY | YSLSS |
| | SLRAED | LNGKEYKCKVSNKA | | TTVTVSS | | GQGTKVE | TTPPTFG | TLTLS |
| | TAVYYC | LPAPIEKTISKAKG | | (SEQ ID | | IK (SEQ | QGTRLEI | KADYE |
| | ARGRGG | QPREPQVYTLPPSR | | NO: 591) | | ID NO: | K (SEQ | KHKVY |
| | SGWLDY | EEMTKNQVSLTCLV | | | | 592) | ID NO: | ACEVT |
| | WGQGTL | KGFYPSDIAVEWES | | | | | 1359) | HQGLS |
| | VTVSS | NGQPENNYKTTPPV | | | | | | SPVTK |
| | (SEQ | LDSDGSFFLYSKLT | | | | | | SFNRG |
| | ID NO: | VDKSRWQQGNVFSC | | | | | | EC |
| | 1652) | SVMHEALHNHYTQK | | | | | | (SEQ |
| | | SLSLSPG (SEQ | | | | | | ID |
| | | ID NO: 44) | | | | | | NO: |
| | | | | | | | | 45) |
| PMAB185 | EVQLLE | ASTKGPSVFPLAPS | GGGGSG | EVQLLESG | GGGGSG | DIQMTQS | DIVMTQS | RTVAA |
| | SGGGLV | SKSTSGGTAALGCL | GGGSGG | GGLVQPGG | GGGSGG | PSSLSAS | PDSLAVS | PSVFI |
| | QPGGSL | VKDYFPEPVTVSWN | GGS | SLRLSCAA | GGSGGG | VGDRVTI | LGERATI | FPPSD |
| | RLSCAA | SGALTSGVHTFPAV | (SEQ | SGFTFSDF | GS | TCRASQS | NCKSSQS | EQLKS |
| | SGFTFS | LQSSGLYSLSSVVT | ID NO: | WMHWVRQA | (SEQ | VSRSLAW | VLYSSNN | GTASV |
| | SYDMSW | VPSSSLGTQTYICN | 30) | PGKGLEWI | ID NO: | YQQKPGK | KNYLAWY | VCLLN |
| | VRQAPG | VNHKPSNTKVDKKV | | SYISGDSG | 22) | APKLLIY | QQKPGQP | NFYPR |
| | KGLEWV | EPKSCDKTHTCPPC | | YTNYADSV | | AASSLQS | PKLLIYW | EAKVQ |
| | SAISIS | PAPEAAGAPSVELE | | KGRFTISR | | GVPSRFS | ASTRESG | WKVDN |
| | GGSTYY | PPKPKDTLMISRTP | | DNSKNTLY | | GSGSGTD | VPDRFSG | ALQSG |
| | ADSVKG | EVTCVVVDVSHEDP | | LQMNSLRA | | FTLTISS | SGSGTDF | NSQES |
| | RFTISR | EVKFNWYVDGVEVH | | EDTAVYYC | | LQPEDFA | TLTISSL | VTEQD |
| | DNSKNT | NAKTKPREEQYNST | | ARDRPYYY | | TYYCQQY | QAEDVAV | SKDST |
| | LYLQMN | YRVVSVLTVLHQDW | | YMDVWGKG | | KSYPVTF | YYCQQYY | YSLSS |
| | SLRAED | LNGKEYKCKVSNKA | | TTVTVSS | | GQGTKVE | STPPTFG | TLTLS |
| | TAVYYC | LPAPIEKTISKAKG | | (SEQ ID | | IK (SEQ | QGTRLEI | KADYE |
| | ARGRGG | QPREPQVYTLPPSR | | NO: 591) | | ID NO: | K (SEQ | KHKVY |
| | SGWLDY | EEMTKNQVSLTCLV | | | | 592) | ID NO: | ACEVT |
| | WGQGTL | KGFYPSDIAVEWES | | | | | 598) | HQGLS |
| | VTVSS | NGQPENNYKTTPPV | | | | | | SPVTK |
| | (SEQ | LDSDGSFFLYSKLT | | | | | | SFNRG |
| | ID NO: | VDKSRWQQGNVFSC | | | | | | EC |
| | 1647) | SVMHEALHNHYTQK | | | | | | (SEQ |
| | | SLSLSPG (SEQ | | | | | | ID |
| | | ID NO: 44) | | | | | | NO: |
| | | | | | | | | 45) |
| PMAB186 | EVQLLE | ASTKGPSVFPLAPS | GGGGSG | EVQLLESG | GGGGSG | DIQMTQS | DIVMTQS | RTVAA |
| | SGGGLV | SKSTSGGTAALGCL | GGGSGG | GGLVQPGG | GGGSGG | PSSLSAS | PDSLAVS | PSVFI |
| | QPGGSL | VKDYFPEPVTVSWN | GGS | SLRLSCAA | GGSGGG | VGDRVTI | LGERATI | FPPSD |
| | RLSCAA | SGALTSGVHTFPAV | (SEQ | SGFTFSDF | GS | TCRASQS | NCKSSQS | EQLKS |
| | SGFTFS | LQSSGLYSLSSVVT | ID NO: | WMHWVRQA | (SEQ | VSRSLAW | VLYSSNN | GTASV |
| | SYDMSW | VPSSSLGTQTYICN | 30) | PGKGLEWI | ID NO: | YQQKPGK | KNYLAWY | VCLLN |
| | VRQAPG | VNHKPSNTKVDKKV | | SYISGDSG | 22) | APKLLIY | QQKPGQP | NFYPR |
| | KGLEWV | EPKSCDKTHTCPPC | | YTNYADSV | | AASSLQS | PKLLIYW | EAKVQ |
| | SAITGS | PAPEAAGAPSVELE | | KGRFTISR | | GVPSRFS | ASTRESG | WKVDN |
| | GGSTYY | PPKPKDTLMISRTP | | DNSKNTLY | | GSGSGTD | VPDRFSG | ALQSG |
| | ADSVKG | EVTCVVVDVSHEDP | | LQMNSLRA | | FTLTISS | SGSGTDF | NSQES |
| | RFTISR | EVKFNWYVDGVEVH | | EDTAVYYC | | LQPEDFA | TLTISSL | VTEQD |
| | DNSKNT | NAKTKPREEQYNST | | ARDRPYYY | | TYYCQQY | QAEDVAV | SKDST |
| | LYLQMN | YRVVSVLTVLHQDW | | YMDVWGKG | | KSYPVTF | YYCQQYY | YSLSS |
| | SLRAED | LNGKEYKCKVSNKA | | TTVTVSS | | GQGTKVE | STPPTFG | TLTLS |
| | TAVYYC | LPAPIEKTISKAKG | | (SEQ ID | | IK (SEQ | QGTRLEI | KADYE |
| | ARGRGG | QPREPQVYTLPPSR | | NO: 591) | | ID NO: | K (SEQ | KHKVY |
| | SGWLDY | EEMTKNQVSLTCLV | | | | 592) | ID NO: | ACEVT |
| | WGQGTL | KGFYPSDIAVEWES | | | | | 598) | HQGLS |
| | VTVSS | NGQPENNYKTTPPV | | | | | | SPVTK |
| | (SEQ | LDSDGSFFLYSKLT | | | | | | SFNRG |
| | ID NO: | VDKSRWQQGNVFSC | | | | | | EC |
| | 1648) | SVMHEALHNHYTQK | | | | | | (SEQ |
| | | SLSLSPG (SEQ | | | | | | ID |
| | | ID NO: 44) | | | | | | NO: |
| | | | | | | | | 45) |
| PMAB187 | EVQLLE | ASTKGPSVFPLAPS | GGGGSG | EVQLLESG | GGGGSG | DIQMTQS | DIVMTQS | RTVAA |
| | SGGGLV | SKSTSGGTAALGCL | GGGSGG | GGLVQPGG | GGGSGG | PSSLSAS | PDSLAVS | PSVFI |
| | QPGGSL | VKDYFPEPVTVSWN | GGS | SLRLSCAA | GGSGGG | VGDRVTI | LGERATI | FPPSD |
| | RLSCAA | SGALTSGVHTFPAV | (SEQ | SGFTFSDF | GS | TCRASQS | NCKSSQS | EQLKS |
| | SGFTFS | LQSSGLYSLSSVVT | ID NO: | WMHWVRQA | (SEQ | VSRSLAW | VLYSSNN | GTASV |
| | SYDMSW | VPSSSLGTQTYICN | 30) | PGKGLEWI | ID NO: | YQQKPGK | KNYLAWY | VCLLN |
| | VRQAPG | VNHKPSNTKVDKKV | | SYISGDSG | 22) | APKLLIY | QQKPGQP | NFYPR |
| | KGLEWV | EPKSCDKTHTCPPC | | YTNYADSV | | AASSLQS | PKLLIYW | EAKVQ |
| | SGISGS | PAPEAAGAPSVELE | | KGRFTISR | | GVPSRFS | ASTRESG | WKVDN |
| | GGSTYY | PPKPKDTLMISRTP | | DNSKNTLY | | GSGSGTD | VPDRFSG | ALQSG |
| | ADSVKG | EVTCVVVDVSHEDP | | LQMNSLRA | | FTLTISS | SGSGTDF | NSQES |
| | RFTISR | EVKFNWYVDGVEVH | | EDTAVYYC | | LQPEDFA | TLTISSL | VTEQD |
| | DNSKNT | NAKTKPREEQYNST | | ARDRPYYY | | TYYCQQY | QAEDVAV | SKDST |
| | LYLQMN | YRVVSVLTVLHQDW | | YMDVWGKG | | KSYPVTF | YYCQQYY | YSLSS |
| | SLRAED | LNGKEYKCKVSNKA | | TTVTVSS | | GQGTKVE | STPPTFG | TLTLS |
| | TAVYYC | LPAPIEKTISKAKG | | (SEQ ID | | IK (SEQ | QGTRLEI | KADYE |
| | ARGRGG | QPREPQVYTLPPSR | | NO: 591) | | ID NO: | K (SEQ | KHKVY |
| | SGWLDY | EEMTKNQVSLTCLV | | | | 592) | ID NO: | ACEVT |
| | WGQGTL | KGFYPSDIAVEWES | | | | | 598) | HQGLS |
| | VTVSS | NGQPENNYKTTPPV | | | | | | SPVTK |
| | (SEQ | LDSDGSFFLYSKLT | | | | | | SFNRG |
| | ID NO: | VDKSRWQQGNVFSC | | | | | | EC |
| | 1649) | SVMHEALHNHYTQK | | | | | | (SEQ |
| | | SLSLSPG (SEQ | | | | | | ID |
| | | ID NO: 44) | | | | | | NO: |
| | | | | | | | | 45) |
| PMAB188 | EVQLLE | ASTKGPSVFPLAPS | GGGGSG | EVQLLESG | GGGGSG | DIQMTQS | DIVMTQS | RTVAA |
| | SGGGLV | SKSTSGGTAALGCL | GGGSGG | GGLVQPGG | GGGSGG | PSSLSAS | PDSLAVS | PSVFI |
| | QPGGSL | VKDYFPEPVTVSWN | GGS | SLRLSCAA | GGSGGG | VGDRVTI | LGERATI | FPPSD |
| | RLSCAA | SGALTSGVHTFPAV | (SEQ | SGFTFSDF | GS | TCRASQS | NCKSSQS | EQLKS |
| | SGFTFS | LQSSGLYSLSSVVT | ID NO: | WMHWVRQA | (SEQ | VSRSLAW | VLYSSNN | GTASV |
| | SYAMSW | VPSSSLGTQTYICN | 30) | PGKGLEWI | ID NO: | YQQKPGK | KNYLAWY | VCLLN |
| | VRQAPG | VNHKPSNTKVDKKV | | SYISGDSG | 22) | APKLLIY | QQKPGQP | NFYPR |
| | KGLEWV | EPKSCDKTHTCPPC | | YTNYADSV | | AASSLQS | PKLLIYW | EAKVQ |
| | SGISGS | PAPEAAGAPSVELE | | KGRFTISR | | GVPSRFS | ASTRESG | WKVDN |
| | GGSTYY | PPKPKDTLMISRTP | | DNSKNTLY | | GSGSGTD | VPDRFSG | ALQSG |
| | ADSVKG | EVTCVVVDVSHEDP | | LQMNSLRA | | FTLTISS | SGSGTDF | NSQES |
| | RFTISR | EVKFNWYVDGVEVH | | EDTAVYYC | | LQPEDFA | TLTISSL | VTEQD |
| | DNSKNT | NAKTKPREEQYNST | | ARDRPYYY | | TYYCQQY | QAEDVAV | SKDST |
| | LYLQMN | YRVVSVLTVLHQDW | | YMDVWGKG | | KSYPVTF | YYCQQYY | YSLSS |
| | SLRAED | LNGKEYKCKVSNKA | | TTVTVSS | | GQGTKVE | STPPTFG | TLTLS |
| | TAVYYC | LPAPIEKTISKAKG | | (SEQ ID | | IK (SEQ | QGTRLEI | KADYE |
| | ARGRGG | QPREPQVYTLPPSR | | NO: 591) | | ID NO: | K (SEQ | KHKVY |
| | SGWLDY | EEMTKNQVSLTCLV | | | | 592) | ID NO: | ACEVT |
| | WGQGTL | KGFYPSDIAVEWES | | | | | 598) | HQGLS |
| | VTVSS | NGQPENNYKTTPPV | | | | | | SPVTK |
| | (SEQ | LDSDGSFFLYSKLT | | | | | | SFNRG |
| | ID NO: | VDKSRWQQGNVFSC | | | | | | EC |
| | 1650) | SVMHEALHNHYTQK | | | | | | (SEQ |
| | | SLSLSPG (SEQ | | | | | | ID |
| | | ID NO: 44) | | | | | | NO: |
| | | | | | | | | 45) |
| PMAB189 | EVQLLE | ASTKGPSVFPLAPS | GGGGSG | EVQLLESG | GGGGSG | DIQMTQS | DIVMTQS | RTVAA |
| | SGGGLV | SKSTSGGTAALGCL | GGGSGG | GGLVQPGG | GGGSGG | PSSLSAS | PDSLAVS | PSVFI |
| | QPGGSL | VKDYFPEPVTVSWN | GGS | SLRLSCAA | GGSGGG | VGDRVTI | LGERATI | FPPSD |
| | RLSCAA | SGALTSGVHTFPAV | (SEQ | SGFTFSDF | GS | TCRASQS | NCKSSQS | EQLKS |
| | SGFTFS | LQSSGLYSLSSVVT | ID NO: | WMHWVRQA | (SEQ | VSRSLAW | VLYSSNN | GTASV |
| | NSDMSW | VPSSSLGTQTYICN | 30) | PGKGLEWI | ID NO: | YQQKPGK | KNYLAWY | VCLLN |
| | VRQAPG | VNHKPSNTKVDKKV | | SYISGDSG | 22) | APKLLIY | QQKPGQP | NFYPR |
| | KGLEWV | EPKSCDKTHTCPPC | | YTNYADSV | | AASSLQS | PKLLIYW | EAKVQ |
| | SAISGS | PAPEAAGAPSVELE | | KGRFTISR | | GVPSRFS | ASTRESG | WKVDN |
| | GGSTYY | PPKPKDTLMISRTP | | DNSKNTLY | | GSGSGTD | VPDRFSG | ALQSG |
| | ADSVKG | EVTCVVVDVSHEDP | | LQMNSLRA | | FTLTISS | SGSGTDF | NSQES |
| | RFTISR | EVKFNWYVDGVEVH | | EDTAVYYC | | LQPEDFA | TLTISSL | VTEQD |
| | DNSKNT | NAKTKPREEQYNST | | ARDRPYYY | | TYYCQQY | QAEDVAV | SKDST |
| | LYLQMN | YRVVSVLTVLHQDW | | YMDVWGKG | | KSYPVTF | YYCQQYY | YSLSS |
| | SLRAED | LNGKEYKCKVSNKA | | TTVTVSS | | GQGTKVE | STPPTFG | TLTLS |
| | TAVYYC | LPAPIEKTISKAKG | | (SEQ ID | | IK (SEQ | QGTRLEI | KADYE |
| | ARGRGG | QPREPQVYTLPPSR | | NO: 591) | | ID NO: | K (SEQ | KHKVY |
| | SGWLDY | EEMTKNQVSLTCLV | | | | 592) | ID NO: | ACEVT |
| | WGQGTL | KGFYPSDIAVEWES | | | | | 598) | HQGLS |
| | VTVSS | NGQPENNYKTTPPV | | | | | | SPVTK |
| | (SEQ | LDSDGSFFLYSKLT | | | | | | SFNRG |
| | ID NO: | VDKSRWQQGNVFSC | | | | | | EC |
| | 1651) | SVMHEALHNHYTQK | | | | | | (SEQ |
| | | SLSLSPG (SEQ | | | | | | ID |
| | | ID NO: 44) | | | | | | NO: |
| | | | | | | | | 45) |
| PMAB190 | EVQLLE | ASTKGPSVFPLAPS | GGGGSG | EVQLLESG | GGGGSG | DIQMTQS | DIVMTQS | RTVAA |
| | SGGGLV | SKSTSGGTAALGCL | GGGSGG | GGLVQPGG | GGGSGG | PSSLSAS | PDSLAVS | PSVFI |
| | QPGGSL | VKDYFPEPVTVSWN | GGS | SLRLSCAA | GGSGGG | VGDRVTI | LGERATI | FPPSD |
| | RLSCAA | SGALTSGVHTFPAV | (SEQ | SGFTFSDF | GS | TCRASQS | NCKSSQS | EQLKS |
| | SGFTFS | LQSSGLYSLSSVVT | ID NO: | WMHWVRQA | (SEQ | VSRSLAW | VLYSSNN | GTASV |
| | SYDMSW | VPSSSLGTQTYICN | 30) | PGKGLEWI | ID NO: | YQQKPGK | KNYLAWY | VCLLN |
| | VRQAPG | VNHKPSNTKVDKKV | | SYISGDSG | 22) | APKLLIY | QQKPGQP | NFYPR |
| | KGLEWV | EPKSCDKTHTCPPC | | YTNYADSV | | AASSLQS | PKLLIYW | EAKVQ |
| | SAISGS | PAPEAAGAPSVELE | | KGRFTISR | | GVPSRFS | ASTRESG | WKVDN |
| | GGSTYY | PPKPKDTLMISRTP | | DNSKNTLY | | GSGSGTD | VPDRFSG | ALQSG |
| | ADSVKG | EVTCVVVDVSHEDP | | LQMNSLRA | | FTLTISS | SGSGTDF | NSQES |
| | RFTISR | EVKFNWYVDGVEVH | | EDTAVYYC | | LQPEDFA | TLTISSL | VTEQD |
| | DNSKNT | NAKTKPREEQYNST | | ARDRPYYY | | TYYCQQY | QAEDVAV | SKDST |
| | LYLQMN | YRVVSVLTVLHQDW | | YMDVWGKG | | KSYPVTF | YYCQQYY | YSLSS |
| | SLRAED | LNGKEYKCKVSNKA | | TTVTVSS | | GQGTKVE | STPPTFG | TLTLS |
| | TAVYYC | LPAPIEKTISKAKG | | (SEQ ID | | IK (SEQ | QGTRLEI | KADYE |
| | ARGRGG | QPREPQVYTLPPSR | | NO: 591) | | ID NO: | K (SEQ | KHKVY |
| | SGWLDY | EEMTKNQVSLTCLV | | | | 592) | ID NO: | ACEVT |
| | WGQGTL | KGFYPSDIAVEWES | | | | | 598) | HQGLS |
| | VTVSS | NGQPENNYKTTPPV | | | | | | SPVTK |
| | (SEQ | LDSDGSFFLYSKLT | | | | | | SFNRG |
| | ID NO: | VDKSRWQQGNVFSC | | | | | | EC |
| | 1652) | SVMHEALHNHYTQK | | | | | | (SEQ |
| | | SLSLSPG (SEQ | | | | | | ID |
| | | ID NO: 44) | | | | | | NO: |
| | | | | | | | | 45) |
| PMAB191 | EVQLLE | ASTKGPSVFPLAPS | GGGGSG | EVQLLESG | GGGGSG | DIQMTQS | DIVMTQS | RTVAA |
| | SGGGLV | SKSTSGGTAALGCL | GGGSGG | GGLVQPGG | GGGSGG | PSSLSAS | PDSLAVS | PSVFI |
| | QPGGSL | VKDYFPEPVTVSWN | GGS | SLRLSCAA | GGSGGG | VGDRVTI | LGERATI | FPPSD |
| | RLSCAA | SGALTSGVHTFPAV | (SEQ | SGFTFSSY | GS | TCRASQS | NCKSSQS | EQLKS |
| | SGFTFS | LQSSGLYSLSSVVT | ID NO: | WMHWVRQA | (SEQ | ISSSLAW | VLYSPNN | GTASV |
| | SYDMSW | VPSSSLGTQTYICN | 30) | PGKGLEWV | ID NO: | YQQKPGK | KNYLAWY | VCLLN |
| | VRQAPG | VNHKPSNTKVDKKV | | SYISGSGG | 22) | APKLLIY | QQKPGQP | NFYPR |
| | KGLEWV | EPKSCDKTHTCPPC | | YTNYADSV | | AASSLQS | PKLLIYW | EAKVQ |
| | SGITIS | PAPEAAGAPSVELE | | KGRFTISR | | GVPSRFS | ASTRESG | WKVDN |
| | GGSTYY | PPKPKDTLMISRTP | | DNSKNTLY | | GSGSGTD | VPDRFSG | ALQSG |
| | ADSVKG | EVTCVVVDVSHEDP | | LQMNSLRA | | FTLTISS | SGSGTDF | NSQES |
| | RFTISR | EVKFNWYVDGVEVH | | EDTAVYYC | | LQPEDFA | TLTISSL | VTEQD |
| | DNSKNT | NAKTKPREEQYNST | | ARDRPYGY | | TYYCQQY | QAEDVAV | SKDST |
| | LYLQMN | YRVVSVLTVLHQDW | | YMDVWGKG | | KSYPVTF | YYCQQYY | YSLSS |
| | SLRAED | LNGKEYKCKVSNKA | | TTVTVSS | | GQGTKVE | TTPPTFG | TLTLS |
| | TAVYYC | LPAPIEKTISKAKG | | (SEQ ID | | IK (SEQ | QGTRLEI | KADYE |
| | ARGRGG | QPREPQVYTLPPSR | | NO: | | ID NO: | K (SEQ | KHKVY |
| | SGWLDY | EEMTKNQVSLTCLV | | 1443) | | 1367) | ID NO: | ACEVT |
| | WGQGTL | KGFYPSDIAVEWES | | | | | 1359) | HQGLS |
| | VTVSS | NGQPENNYKTTPPV | | | | | | SPVTK |
| | (SEQ | LDSDGSFFLYSKLT | | | | | | SFNRG |
| | ID NO: | VDKSRWQQGNVFSC | | | | | | EC |
| | 1643) | SVMHEALHNHYTQK | | | | | | (SEQ |
| | | SLSLSPG (SEQ | | | | | | ID |
| | | ID NO: 44) | | | | | | NO: |
| | | | | | | | | 45) |
| PMAB192 | EVQLLE | ASTKGPSVFPLAPS | GGGGSG | EVQLLESG | GGGGSG | DIQMTQS | DIVMTQS | RTVAA |
| | SGGGLV | SKSTSGGTAALGCL | GGGSGG | GGLVQPGG | GGGSGG | PSSLSAS | PDSLAVS | PSVFI |
| | QPGGSL | VKDYFPEPVTVSWN | GGS | SLRLSCAA | GGSGGG | VGDRVTI | LGERATI | FPPSD |
| | RLSCAA | SGALTSGVHTFPAV | (SEQ | SGFTFSSY | GS | TCRASQS | NCKSSQS | EQLKS |
| | SGFTFS | LQSSGLYSLSSVVT | ID NO: | WMHWVRQA | (SEQ | ISSSLAW | VLYSPNN | GTASV |
| | SYDMSW | VPSSSLGTQTYICN | 30) | PGKGLEWV | ID NO: | YQQKPGK | KNYLAWY | VCLLN |
| | VRQAPG | VNHKPSNTKVDKKV | | SYISGSGG | 22) | APKLLIY | QQKPGQP | NFYPR |
| | KGLEWV | EPKSCDKTHTCPPC | | YTNYADSV | | AASSLQS | PKLLIYW | EAKVQ |
| | SGITIS | PAPEAAGAPSVELE | | KGRFTISR | | GVPSRFS | ASTRESG | WKVDN |
| | GGSTYY | PPKPKDTLMISRTP | | DNSKNTLY | | GSGSGTD | VPDRFSG | ALQSG |
| | ADSVKG | EVTCVVVDVSHEDP | | LQMNSLRA | | FTLTISS | SGSGTDF | NSQES |
| | RFTISR | EVKFNWYVDGVEVH | | EDTAVYYC | | LQPEDFA | TLTISSL | VTEQD |
| | DNSKNT | NAKTKPREEQYNST | | ARDRPYGY | | TYYCQQY | QAEDVAV | SKDST |
| | LYLQMN | YRVVSVLTVLHQDW | | YMDVWGKG | | KSYPVTF | YYCQQYY | YSLSS |
| | SLRAED | LNGKEYKCKVSNKA | | TTVTVSS | | GQGTKVE | TTPPTFG | TLTLS |
| | TAVYYC | LPAPIEKTISKAKG | | (SEQ ID | | IK (SEQ | QGTRLEI | KADYE |
| | ARGRGG | QPREPQVYTLPPSR | | NO: | | ID NO: | K (SEQ | KHKVY |
| | SGWLDY | EEMTKNQVSLTCLV | | 1443) | | 1367) | ID NO: | ACEVT |
| | WGQGTL | KGFYPSDIAVEWES | | | | | 1359) | HQGLS |
| | VTVSS | NGQPENNYKTTPPV | | | | | | SPVTK |
| | (SEQ | LDSDGSFFLYSKLT | | | | | | SFNRG |
| | ID NO: | VDKSRWQQGNVFSC | | | | | | EC |
| | 1643) | SVMHEALHNHYTQK | | | | | | (SEQ |
| | | SLSLSPG (SEQ | | | | | | ID |
| | | ID NO: 44) | | | | | | NO: |
| | | | | | | | | 45) |
| PMAB193 | EVQLLE | ASTKGPSVFPLAPS | GGGGSG | EVQLLESG | GGGGSG | DIQMTQS | DIVMTQS | RTVAA |
| | SGGGLV | SKSTSGGTAALGCL | GGGSGG | GGLVQPGG | GGGSGG | PSSLSAS | PDSLAVS | PSVFI |
| | QPGGSL | VKDYFPEPVTVSWN | GGS | SLRLSCAA | GGSGGG | VGDRVTI | LGERATI | FPPSD |
| | RLSCAA | SGALTSGVHTFPAV | (SEQ | SGFTFSSY | GS | TCRASQS | NCKSSQS | EQLKS |
| | SGFTFS | LQSSGLYSLSSVVT | ID NO: | WMHWVRQA | (SEQ | ISSSLAW | VLYSSNN | GTASV |
| | SYDMSW | VPSSSLGTQTYICN | 30) | PGKGLEWV | ID NO: | YQQKPGK | KNYLAWY | VCLLN |
| | VRQAPG | VNHKPSNTKVDKKV | | SYISGSGG | 22) | APKLLIY | QQKPGQP | NFYPR |
| | KGLEWV | EPKSCDKTHTCPPC | | YTNYADSV | | AASSLQS | PKLLIYW | EAKVQ |
| | SGITIS | PAPEAAGAPSVELE | | KGRFTISR | | GVPSRFS | ASTRESG | WKVDN |
| | GGSTYY | PPKPKDTLMISRTP | | DNSKNTLY | | GSGSGTD | VPDRFSG | ALQSG |
| | ADSVKG | EVTCVVVDVSHEDP | | LQMNSLRA | | FTLTISS | SGSGTDF | NSQES |
| | RFTISR | EVKFNWYVDGVEVH | | EDTAVYYC | | LQPEDFA | TLTISSL | VTEQD |
| | DNSKNT | NAKTKPREEQYNST | | ARDRPYGY | | TYYCQQY | QAEDVAV | SKDST |
| | LYLQMN | YRVVSVLTVLHQDW | | YMDVWGKG | | KSYPVTF | YYCQQYY | YSLSS |
| | SLRAED | LNGKEYKCKVSNKA | | TTVTVSS | | GQGTKVE | STPPTFG | TLTLS |
| | TAVYYC | LPAPIEKTISKAKG | | (SEQ ID | | IK (SEQ | QGTRLEI | KADYE |
| | ARGRGG | QPREPQVYTLPPSR | | NO: | | ID NO: | K (SEQ | KHKVY |
| | SGWLDY | EEMTKNQVSLTCLV | | 1443) | | 1367) | ID NO: | ACEVT |
| | WGQGTL | KGFYPSDIAVEWES | | | | | 598) | HQGLS |
| | VTVSS | NGQPENNYKTTPPV | | | | | | SPVTK |
| | (SEQ | LDSDGSFFLYSKLT | | | | | | SFNRG |
| | ID NO: | VDKSRWQQGNVFSC | | | | | | EC |
| | 1643) | SVMHEALHNHYTQK | | | | | | (SEQ |
| | | SLSLSPG (SEQ | | | | | | ID |
| | | ID NO: 44) | | | | | | NO: |
| | | | | | | | | 45) |
| PMAB194 | EVQLLE | ASTKGPSVFPLAPS | GGGGSG | EVQLLESG | GGGGSG | DIQMTQS | DIVMTQS | RTVAA |
| | SGGGLV | SKSTSGGTAALGCL | GGGSGG | GGLVQPGG | GGGSGG | PSSLSAS | PDSLAVS | PSVFI |
| | QPGGSL | VKDYFPEPVTVSWN | GGS | SLRLSCAA | GGSGGG | VGDRVTI | LGERATI | FPPSD |
| | RLSCAA | SGALTSGVHTFPAV | (SEQ | SGFTFSSY | GS | TCRASQS | NCKSSQS | EQLKS |
| | SGFTFS | LQSSGLYSLSSVVT | ID NO: | WMHWVRQA | (SEQ | ISSSLAW | VLYSSNN | GTASV |
| | SYDMSW | VPSSSLGTQTYICN | 30) | PGKGLEWV | ID NO: | YQQKPGK | KNYLAWY | VCLLN |
| | VRQAPG | VNHKPSNTKVDKKV | | SYISGSGG | 22) | APKLLIY | QQKPGQP | NFYPR |
| | KGLEWV | EPKSCDKTHTCPPC | | YTNYADSV | | AASSLQS | PKLLIYW | EAKVQ |
| | SGITIS | PAPEAAGAPSVELE | | KGRFTISR | | GVPSRFS | ASTRESG | WKVDN |
| | GGSTYY | PPKPKDTLMISRTP | | DNSKNTLY | | GSGSGTD | VPDRFSG | ALQSG |
| | ADSVKG | EVTCVVVDVSHEDP | | LQMNSLRA | | FTLTISS | SGSGTDF | NSQES |
| | RFTISR | EVKFNWYVDGVEVH | | EDTAVYYC | | LQPEDFA | TLTISSL | VTEQD |
| | DNSKNT | NAKTKPREEQYNST | | ARDRPYGY | | TYYCQQY | QAEDVAV | SKDST |
| | LYLQMN | YRVVSVLTVLHQDW | | YMDVWGKG | | KSYPVTF | YYCQQYY | YSLSS |
| | SLRAED | LNGKEYKCKVSNKA | | TTVTVSS | | GQGTKVE | TTPPTFG | TLTLS |
| | TAVYYC | LPAPIEKTISKAKG | | (SEQ ID | | IK (SEQ | QGTRLEI | KADYE |
| | ARGRGG | QPREPQVYTLPPSR | | NO: | | ID NO: | K (SEQ | KHKVY |
| | SGWLDY | EEMTKNQVSLTCLV | | 1443) | | 1367) | ID NO: | ACEVT |
| | WGQGTL | KGFYPSDIAVEWES | | | | | 1614) | HQGLS |
| | VTVSS | NGQPENNYKTTPPV | | | | | | SPVTK |
| | (SEQ | LDSDGSFFLYSKLT | | | | | | SFNRG |
| | ID NO: | VDKSRWQQGNVFSC | | | | | | EC |
| | 1643) | SVMHEALHNHYTQK | | | | | | (SEQ |
| | | SLSLSPG (SEQ | | | | | | ID |
| | | ID NO: 44) | | | | | | NO: |
| | | | | | | | | 45) |
| PMAB195 | EVQLLE | ASTKGPSVFPLAPS | GGGGSG | EVQLLESG | GGGGSG | DIQMTQS | DIVMTQS | RTVAA |
| | SGGGLV | SKSTSGGTAALGCL | GGGSGG | GGLVQPGG | GGGSGG | PSSLSAS | PDSLAVS | PSVFI |
| | QPGGSL | VKDYFPEPVTVSWN | GGS | SLRLSCAA | GGSGGG | VGDRVTI | LGERATI | FPPSD |
| | RLSCAA | SGALTSGVHTFPAV | (SEQ | SGFTFSSY | GS | TCRASQS | NCKSSQS | EQLKS |
| | SGFTFS | LQSSGLYSLSSVVT | ID NO: | WMHWVRQA | (SEQ | ISSSLAW | VLYSPNN | GTASV |
| | SYDMSW | VPSSSLGTQTYICN | 30) | PGKGLEWV | ID NO: | YQQKPGK | KNYLAWY | VCLLN |
| | VRQAPG | VNHKPSNTKVDKKV | | SYISGSGG | 22) | APKLLIY | QQKPGQP | NFYPR |
| | KGLEWV | EPKSCDKTHTCPPC | | YTNYADSV | | AASSLQS | PKLLIYW | EAKVQ |
| | SGITIS | PAPEAAGAPSVELE | | KGRFTISR | | GVPSRFS | ASTRESG | WKVDN |
| | GGSTYY | PPKPKDTLMISRTP | | DNSKNTLY | | GSGSGTD | VPDRFSG | ALQSG |
| | ADSVKG | EVTCVVVDVSHEDP | | LQMNSLRA | | FTLTISS | SGSGTDF | NSQES |
| | RFTISR | EVKFNWYVDGVEVH | | EDTAVYYC | | LQPEDFA | TLTISSL | VTEQD |
| | DNSKNT | NAKTKPREEQYNST | | ARDRPYGY | | TYYCQQY | QAEDVAV | SKDST |
| | LYLQMN | YRVVSVLTVLHQDW | | YMDVWGKG | | KSYPVTF | YYCQQYY | YSLSS |
| | SLRAED | LNGKEYKCKVSNKA | | TTVTVSS | | GQGTKVE | STPPTFG | TLTLS |
| | TAVYYC | LPAPIEKTISKAKG | | (SEQ ID | | IK (SEQ | QGTRLEI | KADYE |
| | ARGRGG | QPREPQVYTLPPSR | | NO: | | ID NO: | K (SEQ | KHKVY |
| | SGWLDY | EEMTKNQVSLTCLV | | 1443) | | 1367) | ID NO: | ACEVT |
| | WGQGTL | KGFYPSDIAVEWES | | | | | 1615) | HQGLS |
| | VTVSS | NGQPENNYKTTPPV | | | | | | SPVTK |
| | (SEQ | LDSDGSFFLYSKLT | | | | | | SFNRG |
| | ID NO: | VDKSRWQQGNVFSC | | | | | | EC |
| | 1643) | SVMHEALHNHYTQK | | | | | | (SEQ |
| | | SLSLSPG (SEQ | | | | | | ID |
| | | ID NO: 44) | | | | | | NO: |
| | | | | | | | | 45) |
| PMAB196 | EVQLLE | ASTKGPSVFPLAPS | GGGGSG | EVQLLESG | GGGGSG | DIQMTQS | DIVMTQS | RTVAA |
| | SGGGLV | SKSTSGGTAALGCL | GGGSGG | GGLVQPGG | GGGSGG | PSSLSAS | PDSLAVS | PSVFI |
| | QPGGSL | VKDYFPEPVTVSWN | GGS | SLRLSCAA | GGSGGG | VGDRVTI | LGERATI | FPPSD |
| | RLSCAA | SGALTSGVHTFPAV | (SEQ | SGFTFSSY | GS | TCRASQS | NCKSSQS | EQLKS |
| | SGFTFS | LQSSGLYSLSSVVT | ID NO: | WMHWVRQA | (SEQ | ISSSLAW | VLYSPNN | GTASV |
| | SYDMSW | VPSSSLGTQTYICN | 30) | PGKGLEWV | ID NO: | YQQKPGK | KNYLAWY | VCLLN |
| | VRQAPG | VNHKPSNTKVDKKV | | SYISGSGG | 22) | APKLLIY | QQKPGQP | NFYPR |
| | KGLEWV | EPKSCDKTHTCPPC | | YTNYADSV | | AASSLQS | PKLLIYW | EAKVQ |
| | SGITIS | PAPEAAGAPSVELE | | KGRFTISR | | GVPSRFS | ASTRESG | WKVDN |
| | GGSTYY | PPKPKDTLMISRTP | | DNSKNTLY | | GSGSGTD | VPDRFSG | ALQSG |
| | ADSVKG | EVTCVVVDVSHEDP | | LQMNSLRA | | FTLTISS | SGSGTDF | NSQES |
| | RFTISR | EVKFNWYVDGVEVH | | EDTAVYYC | | LQPEDFA | TLTISSL | VTEQD |
| | DNSKNT | NAKTKPREEQYNST | | ARDRPYYY | | TYYCQQY | QAEDVAV | SKDST |
| | LYLQMN | YRVVSVLTVLHQDW | | DMDVWGKG | | KSYPVTF | YYCQQYY | YSLSS |
| | SLRAED | LNGKEYKCKVSNKA | | TTVTVSS | | GQGTKVE | TTPPTFG | TLTLS |
| | TAVYYC | LPAPIEKTISKAKG | | (SEQ ID | | IK (SEQ | QGTRLEI | KADYE |
| | ARGRGG | QPREPQVYTLPPSR | | NO: | | ID NO: | K (SEQ | KHKVY |
| | SGWLDY | EEMTKNQVSLTCLV | | 1445) | | 1367) | ID NO: | ACEVT |
| | WGQGTL | KGFYPSDIAVEWES | | | | | 1359) | HQGLS |
| | VTVSS | NGQPENNYKTTPPV | | | | | | SPVTK |
| | (SEQ | LDSDGSFFLYSKLT | | | | | | SFNRG |
| | ID NO: | VDKSRWQQGNVFSC | | | | | | EC |
| | 1643) | SVMHEALHNHYTQK | | | | | | (SEQ |
| | | SLSLSPG (SEQ | | | | | | ID |
| | | ID NO: 44) | | | | | | NO: |
| | | | | | | | | 45) |
| PMAB197 | EVQLLE | ASTKGPSVFPLAPS | GGGGSG | EVQLLESG | GGGGSG | DIQMTQS | DIVMTQS | RTVAA |
| | SGGGLV | SKSTSGGTAALGCL | GGGSGG | GGLVQPGG | GGGSGG | PSSLSAS | PDSLAVS | PSVFI |
| | QPGGSL | VKDYFPEPVTVSWN | GGS | SLRLSCAA | GGSGGG | VGDRVTI | LGERATI | FPPSD |
| | RLSCAA | SGALTSGVHTFPAV | (SEQ | SGFTFSSY | GS | TCRASQS | NCKSSQS | EQLKS |
| | SGFTFS | LQSSGLYSLSSVVT | ID NO: | WMHWVRQA | (SEQ | ISSSLAW | VLYSPNN | GTASV |
| | SYDMSW | VPSSSLGTQTYICN | 30) | PGKGLEWV | ID NO: | YQQKPGK | KNYLAWY | VCLLN |
| | VRQAPG | VNHKPSNTKVDKKV | | SYISGSGG | 22) | APKLLIY | QQKPGQP | NFYPR |
| | KGLEWV | EPKSCDKTHTCPPC | | YTNYADSV | | AASSLQS | PKLLIYW | EAKVQ |
| | SGITIS | PAPEAAGAPSVELE | | KGRFTISR | | GVPSRFS | ASTRESG | WKVDN |
| | GGSTYY | PPKPKDTLMISRTP | | DNSKNTLY | | GSGSGTD | VPDRFSG | ALQSG |
| | ADSVKG | EVTCVVVDVSHEDP | | LQMNSLRA | | FTLTISS | SGSGTDF | NSQES |
| | RFTISR | EVKFNWYVDGVEVH | | EDTAVYYC | | LQPEDFA | TLTISSL | VTEQD |
| | DNSKNT | NAKTKPREEQYNST | | ARDRPYYY | | TYYCQQY | QAEDVAV | SKDST |
| | LYLQMN | YRVVSVLTVLHQDW | | DMDVWGKG | | KSYPVTF | YYCQQYY | YSLSS |
| | SLRAED | LNGKEYKCKVSNKA | | TTVTVSS | | GQGTKVE | TTPPTFG | TLTLS |
| | TAVYYC | LPAPIEKTISKAKG | | (SEQ ID | | IK (SEQ | QGTRLEI | KADYE |
| | ARGRGG | QPREPQVYTLPPSR | | NO: | | ID NO: | K (SEQ | KHKVY |
| | SGWLDY | EEMTKNQVSLTCLV | | 1445) | | 1367) | ID NO: | ACEVT |
| | WGQGTL | KGFYPSDIAVEWES | | | | | 1359) | HQGLS |
| | VTVSS | NGQPENNYKTTPPV | | | | | | SPVTK |
| | (SEQ | LDSDGSFFLYSKLT | | | | | | SFNRG |
| | ID NO: | VDKSRWQQGNVFSC | | | | | | EC |
| | 1643) | SVMHEALHNHYTQK | | | | | | (SEQ |
| | | SLSLSPG (SEQ | | | | | | ID |
| | | ID NO: 44) | | | | | | NO: |
| | | | | | | | | 45) |
| PMAB198 | EVQLLE | ASTKGPSVFPLAPS | GGGGSG | EVQLLESG | GGGGSG | DIQMTQS | DIVMTQS | RTVAA |
| | SGGGLV | SKSTSGGTAALGCL | GGGSGG | GGLVQPGG | GGGSGG | PSSLSAS | PDSLAVS | PSVFI |
| | QPGGSL | VKDYFPEPVTVSWN | GGS | SLRLSCAA | GGSGGG | VGDRVTI | LGERATI | FPPSD |
| | RLSCAA | SGALTSGVHTFPAV | (SEQ | SGFTFSSY | GS | TCRASQS | NCKSSQS | EQLKS |
| | SGFTFS | LQSSGLYSLSSVVT | ID NO: | WMHWVRQA | (SEQ | ISSSLAW | VLYSPNN | GTASV |
| | SYDMSW | VPSSSLGTQTYICN | 30) | PGKGLEWV | ID NO: | YQQKPGK | KNYLAWY | VCLLN |
| | VRQAPG | VNHKPSNTKVDKKV | | SYISGSGG | 22) | APKLLIY | QQKPGQP | NFYPR |
| | KGLEWV | EPKSCDKTHTCPPC | | YTNYADSV | | AASSLQS | PKLLIYW | EAKVQ |
| | SGITIS | PAPEAAGAPSVELE | | KGRFTISR | | GVPSRFS | ASTRESG | WKVDN |
| | GGSTYY | PPKPKDTLMISRTP | | DNSKNTLY | | GSGSGTD | VPDRFSG | ALQSG |
| | ADSVKG | EVTCVVVDVSHEDP | | LQMNSLRA | | FTLTISS | SGSGTDF | NSQES |
| | RFTISR | EVKFNWYVDGVEVH | | EDTAVYYC | | LQPEDFA | TLTISSL | VTEQD |
| | DNSKNT | NAKTKPREEQYNST | | ARDRPYGY | | TYYCQQY | QAEDVAV | SKDST |
| | LYLQMN | YRVVSVLTVLHQDW | | YMDVWGKG | | KSYPVTF | YYCQQYY | YSLSS |
| | SLRAED | LNGKEYKCKVSNKA | | TTVTVSS | | GQGTKVE | TTPPTFG | TLTLS |
| | TAVYYC | LPAPIEKTISKAKG | | (SEQ ID | | IK (SEQ | QGTRLEI | KADYE |
| | ARGRGG | QPREPQVYTLPPSR | | NO: | | ID NO: | K (SEQ | KHKVY |
| | SGWLDY | EEMTKNQVSLTCLV | | 1443) | | 1367) | ID NO: | ACEVT |
| | WGQGTD | KGFYPSDIAVEWES | | | | | 1359) | HQGLS |
| | VTVSS | NGQPENNYKTTPPV | | | | | | SPVTK |
| | (SEQ | LDSDGSFFLYSKLT | | | | | | SFNRG |
| | ID NO: | VDKSRWQQGNVFSC | | | | | | EC |
| | 1653) | SVMHEALHNHYTQK | | | | | | (SEQ |
| | | SLSLSPG (SEQ | | | | | | ID |
| | | ID NO: 44) | | | | | | NO: |
| | | | | | | | | 45) |
| PMAB199 | EVQLLE | ASTKGPSVFPLAPS | GGGGSG | EVQLLESG | GGGGSG | DIQMTQS | DIVMTQS | RTVAA |
| | SGGGLV | SKSTSGGTAALGCL | GGGSGG | GGLVQPGG | GGGSGG | PSSLSAS | PDSLAVS | PSVFI |
| | QPGGSL | VKDYFPEPVTVSWN | GGS | SLRLSCAA | GGSGGG | VGDRVTI | LGERATI | FPPSD |
| | RLSCAA | SGALTSGVHTFPAV | (SEQ | SGFTFSSY | GS | TCRASQS | NCKSSQS | EQLKS |
| | SGFTFS | LQSSGLYSLSSVVT | ID NO: | WMHWVRQA | (SEQ | ISSSLAW | VLYSPNN | GTASV |
| | SYDMSW | VPSSSLGTQTYICN | 30) | PGKGLEWV | ID NO: | YQQKPGK | KNYLAWY | VCLLN |
| | VRQAPG | VNHKPSNTKVDKKV | | SYISGSGG | 22) | APKLLIY | QQKPGQP | NFYPR |
| | KGLEWV | EPKSCDKTHTCPPC | | YTNYADSV | | AASSLQS | PKLLIYW | EAKVQ |
| | SGITIS | PAPEAAGAPSVELE | | KGRFTISR | | GVPSRFS | ASTRESG | WKVDN |
| | GGSTYY | PPKPKDTLMISRTP | | DNSKNTLY | | GSGSGTD | VPDRFSG | ALQSG |
| | ADSVKG | EVTCVVVDVSHEDP | | LQMNSLRA | | FTLTISS | SGSGTDF | NSQES |
| | RFTISR | EVKFNWYVDGVEVH | | EDTAVYYC | | LQPEDFA | TLTISSL | VTEQD |
| | DNSKNT | NAKTKPREEQYNST | | ARDRPYGY | | TYYCQQY | QAEDVAV | SKDST |
| | LYLQMN | YRVVSVLTVLHQDW | | YMDVWGKG | | KSYPVTF | YYCQQYY | YSLSS |
| | SLRAED | LNGKEYKCKVSNKA | | TTVTVSS | | GQGTKVE | TTPPTFG | TLTLS |
| | TAVYYC | LPAPIEKTISKAKG | | (SEQ ID | | IK (SEQ | QGTRLEI | KADYE |
| | ARGRGG | QPREPQVYTLPPSR | | NO: | | ID NO: | K (SEQ | KHKVY |
| | SGWLDY | EEMTKNQVSLTCLV | | 1443) | | 1367) | ID NO: | ACEVT |
| | WGQGTT | KGFYPSDIAVEWES | | | | | 1359) | HQGLS |
| | VTVSS | NGQPENNYKTTPPV | | | | | | SPVTK |
| | (SEQ | LDSDGSFFLYSKLT | | | | | | SFNRG |
| | ID NO: | VDKSRWQQGNVFSC | | | | | | EC |
| | 1476) | SVMHEALHNHYTQK | | | | | | (SEQ |
| | | SLSLSPG (SEQ | | | | | | ID |
| | | ID NO: 44) | | | | | | NO: |
| | | | | | | | | 45) |
| PMAB200 | EVQLLE | ASTKGPSVFPLAPS | GGGGSG | EVQLLESG | GGGGSG | DIQMTQS | DIVMTQS | RTVAA |
| | SGGGLV | SKSTSGGTAALGCL | GGGSGG | GGLVQPGG | GGGSGG | PSSLSAS | PDSLAVS | PSVFI |
| | QPGGSL | VKDYFPEPVTVSWN | GGS | SLRLSCAA | GGSGGG | VGDRVTI | LGERATI | FPPSD |
| | RLSCAA | SGALTSGVHTFPAV | (SEQ | SGFTFSSY | GS | TCRASQS | NCKSSQS | EQLKS |
| | SGFTFS | LQSSGLYSLSSVVT | ID NO: | WMHWVRQA | (SEQ | ISSSLAW | VLYSPNN | GTASV |
| | SYDMSW | VPSSSLGTQTYICN | 30) | PGKGLEWV | ID NO: | YQQKPGK | KNYLAWY | VCLLN |
| | VRQAPG | VNHKPSNTKVDKKV | | SYISGSGG | 22) | APKLLIY | QQKPGQP | NFYPR |
| | KGLEWV | EPKSCDKTHTCPPC | | YTNYADSV | | AASSLQS | PKLLIYW | EAKVQ |
| | SGITIS | PAPEAAGAPSVELE | | KGRFTISR | | GVPSRFS | ASTRESG | WKVDN |
| | GGSTYY | PPKPKDTLMISRTP | | DNSKNTLY | | GSGSGTD | VPDRFSG | ALQSG |
| | ADSVKG | EVTCVVVDVSHEDP | | LQMNSLRA | | FTLTISS | SGSGTDF | NSQES |
| | RFTISR | EVKFNWYVDGVEVH | | EDTAVYYC | | LQPEDFA | TLTISSL | VTEQD |
| | DNSKNT | NAKTKPREEQYNST | | ARDRPYYY | | TYYCQQY | QAEDVAV | SKDST |
| | LYLQMN | YRVVSVLTVLHQDW | | DMDVWGKG | | KSYPVTF | YYCQQYY | YSLSS |
| | SLRAED | LNGKEYKCKVSNKA | | TTVTVSS | | GQGTKVE | TTPPTFG | TLTLS |
| | TAVYYC | LPAPIEKTISKAKG | | (SEQ ID | | IK (SEQ | QGTRLEI | KADYE |
| | ARGRGG | QPREPQVYTLPPSR | | NO: | | ID NO: | K (SEQ | KHKVY |
| | SGWLDY | EEMTKNQVSLTCLV | | 1445) | | 1367) | ID NO: | ACEVT |
| | WGQGTD | KGFYPSDIAVEWES | | | | | 1359) | HQGLS |
| | VTVSS | NGQPENNYKTTPPV | | | | | | SPVTK |
| | (SEQ | LDSDGSFFLYSKLT | | | | | | SFNRG |
| | ID NO: | VDKSRWQQGNVFSC | | | | | | EC |
| | 1653) | SVMHEALHNHYTQK | | | | | | (SEQ |
| | | SLSLSPG (SEQ | | | | | | ID |
| | | ID NO: 44) | | | | | | NO: |
| | | | | | | | | 45) |
| PMAB201 | QVQLVQ | ASTKGPSVFPLAPS | GGGGSG | EVQLLESG | GGGGSG | DIQMTQS | DIQMTQS | RTVAA |
| | SGAEVK | SKSTSGGTAALGCL | GGGSGG | GGLVQPGG | GGGSGG | PSSLSAS | PSSLSAS | PSVFI |
| | KPGASV | VKDYFPEPVTVSWN | GGS | SLRLSCAA | GGSGGG | VGDRVTI | VGDRVTI | FPPSD |
| | KVSCKA | SGALTSGVHTFPAV | (SEQ | SGFTFSDE | GS | TCRASQS | TCRASQS | EQLKS |
| | SGYTFT | LQSSGLYSLSSVVT | ID NO: | WMHWVRQA | (SEQ | VSRSLAW | ISNWVAW | GTASV |
| | DHYMHW | VPSSSLGTQTYICN | 30) | PGKGLEWI | ID NO: | YQQKPGK | YQQKPGK | VCLLN |
| | VRQAPG | VNHKPSNTKVDKKV | | SYISGDSG | 22) | APKLLIY | APKLLIY | NFYPR |
| | QGLEWM | EPKSCDKTHTCPPC | | YTNYADSV | | AASSLQS | RASTLQS | EAKVQ |
| | GTIAPS | PAPEAAGAPSVELE | | KGRFTISR | | GVPSRFS | GVPSRFS | WKVDN |
| | GGRTSY | PPKPKDTLMISRTP | | DNSKNTLY | | GSGSGTD | GSGSGTD | ALQSG |
| | AQKFQG | EVTCVVVDVSHEDP | | LQMNSLRA | | FTLTISS | FTLTISS | NSQES |
| | RVTMTR | EVKFNWYVDGVEVH | | EDTAVYYC | | LQPEDFA | LQPEDFA | VTEQD |
| | DTSTST | NAKTKPREEQYNST | | ARDRPYYY | | TYYCQQY | TYYCQQS | SKDST |
| | VYMELS | YRVVSVLTVLHQDW | | YMDVWGKG | | KSYPVTF | HSLPLTF | YSLSS |
| | SLRSED | LNGKEYKCKVSNKA | | TTVTVSS | | GQGTKVE | GPGTKVD | TLTLS |
| | TAVYYC | LPAPIEKTISKAKG | | (SEQ ID | | IK (SEQ | IK (SEQ | KADYE |
| | AADNGH | QPREPQVYTLPPSR | | NO: 591) | | ID NO: | ID NO: | KHKVY |
| | ASGWLY | EEMTKNQVSLTCLV | | | | 592) | 1655) | ACEVT |
| | YYGMDV | KGFYPSDIAVEWES | | | | | | HQGLS |
| | WGQGTT | NGQPENNYKTTPPV | | | | | | SPVTK |
| | VTVSS | LDSDGSFFLYSKLT | | | | | | SFNRG |
| | (SEQ | VDKSRWQQGNVFSC | | | | | | EC |
| | ID NO: | SVMHEALHNHYTQK | | | | | | (SEQ |
| | 1654) | SLSLSPG (SEQ | | | | | | ID |
| | | ID NO: 44) | | | | | | NO: |
| | | | | | | | | 45) |
| PMAB202 | QVQLVQ | ASTKGPSVFPLAPS | GGGGSG | EVQLLESG | GGGGSG | DIQMTQS | DIQMTQS | RTVAA |
| | SGAEVK | SKSTSGGTAALGCL | GGGSGG | GGLVQPGG | GGGSGG | PSSLSAS | PSSLSAS | PSVFI |
| | KPGASV | VKDYFPEPVTVSWN | GGS | SLRLSCAA | GGSGGG | VGDRVTI | VGDRVTI | FPPSD |
| | KVSCKA | SGALTSGVHTFPAV | (SEQ | SGFTFSDE | GS | TCRASQS | TCRASQS | EQLKS |
| | SGYTES | LQSSGLYSLSSVVT | ID NO: | WMHWVRQA | (SEQ | VSRSLAW | ISNWVAW | GTASV |
| | SHYMHW | VPSSSLGTQTYICN | 30) | PGKGLEWI | ID NO: | YQQKPGK | YQQKPGK | VCLLN |
| | VRQAPG | VNHKPSNTKVDKKV | | SYISGDSG | 22) | APKLLIY | APKLLIY | NFYPR |
| | QGLEWM | EPKSCDKTHTCPPC | | YTNYADSV | | AASSLQS | RASTLQS | EAKVQ |
| | GTIAPS | PAPEAAGAPSVELE | | KGRFTISR | | GVPSRFS | GVPSRFS | WKVDN |
| | GGRTSY | PPKPKDTLMISRTP | | DNSKNTLY | | GSGSGTD | GSGSGTD | ALQSG |
| | AQKFQG | EVTCVVVDVSHEDP | | LQMNSLRA | | FTLTISS | FTLTISS | NSQES |
| | RVTMTR | EVKFNWYVDGVEVH | | EDTAVYYC | | LQPEDFA | LQPEDFA | VTEQD |
| | DTSTST | NAKTKPREEQYNST | | ARDRPYYY | | TYYCQQY | TYYCQQS | SKDST |
| | VYMELS | YRVVSVLTVLHQDW | | YMDVWGKG | | KSYPVTF | HSLPLTF | YSLSS |
| | SLRSED | LNGKEYKCKVSNKA | | TTVTVSS | | GQGTKVE | GPGTKVD | TLTLS |
| | TAVYYC | LPAPIEKTISKAKG | | (SEQ ID | | IK (SEQ | IK (SEQ | KADYE |
| | AADNGH | QPREPQVYTLPPSR | | NO: 591) | | ID NO: | ID NO: | KHKVY |
| | ASGWLY | EEMTKNQVSLTCLV | | | | 592) | 1655) | ACEVT |
| | YYGMDV | KGFYPSDIAVEWES | | | | | | HQGLS |
| | WGQGTT | NGQPENNYKTTPPV | | | | | | SPVTK |
| | VTVSS | LDSDGSFFLYSKLT | | | | | | SFNRG |
| | (SEQ | VDKSRWQQGNVFSC | | | | | | EC |
| | ID NO: | SVMHEALHNHYTQK | | | | | | (SEQ |
| | 1656) | SLSLSPG (SEQ | | | | | | ID |
| | | ID NO: 44) | | | | | | NO: |
| | | | | | | | | 45) |
| PMAB203 | QVQLVQ | ASTKGPSVFPLAPS | GGGGSG | EVQLLESG | GGGGSG | DIQMTQS | DIQMTQS | RTVAA |
| | SGAEVK | SKSTSGGTAALGCL | GGGSGG | GGLVQPGG | GGGSGG | PSSLSAS | PSSLSAS | PSVFI |
| | KPGASV | VKDYFPEPVTVSWN | GGS | SLRLSCAA | GGSGGG | VGDRVTI | VGDRVTI | FPPSD |
| | KVSCKA | SGALTSGVHTFPAV | (SEQ | SGFTFSDE | GS | TCRASQS | TCRASQS | EQLKS |
| | SGYTES | LQSSGLYSLSSVVT | ID NO: | WMHWVRQA | (SEQ | VSRSLAW | ISNWVAW | GTASV |
| | DYYMHW | VPSSSLGTQTYICN | 30) | PGKGLEWI | ID NO: | YQQKPGK | YQQKPGK | VCLLN |
| | VRQAPG | VNHKPSNTKVDKKV | | SYISGDSG | 22) | APKLLIY | APKLLIY | NFYPR |
| | QGLEWM | EPKSCDKTHTCPPC | | YTNYADSV | | AASSLQS | RASTLQS | EAKVQ |
| | GTIAPS | PAPEAAGAPSVELE | | KGRFTISR | | GVPSRFS | GVPSRFS | WKVDN |
| | GGRTSY | PPKPKDTLMISRTP | | DNSKNTLY | | GSGSGTD | GSGSGTD | ALQSG |
| | AQKFQG | EVTCVVVDVSHEDP | | LQMNSLRA | | FTLTISS | FTLTISS | NSQES |
| | RVTMTR | EVKFNWYVDGVEVH | | EDTAVYYC | | LQPEDFA | LQPEDFA | VTEQD |
| | DTSTST | NAKTKPREEQYNST | | ARDRPYYY | | TYYCQQY | TYYCQQS | SKDST |
| | VYMELS | YRVVSVLTVLHQDW | | YMDVWGKG | | KSYPVTF | HSLPLTF | YSLSS |
| | SLRSED | LNGKEYKCKVSNKA | | TTVTVSS | | GQGTKVE | GPGTKVD | TLTLS |
| | TAVYYC | LPAPIEKTISKAKG | | (SEQ ID | | IK (SEQ | IK (SEQ | KADYE |
| | AADNGH | QPREPQVYTLPPSR | | NO: 591) | | ID NO: | ID NO: | KHKVY |
| | ASGWLY | EEMTKNQVSLTCLV | | | | 592) | 1655) | ACEVT |
| | YYGMDV | KGFYPSDIAVEWES | | | | | | HQGLS |
| | WGQGTT | NGQPENNYKTTPPV | | | | | | SPVTK |
| | VTVSS | LDSDGSFFLYSKLT | | | | | | SFNRG |
| | (SEQ | VDKSRWQQGNVFSC | | | | | | EC |
| | ID NO: | SVMHEALHNHYTQK | | | | | | (SEQ |
| | 1657) | SLSLSPG (SEQ | | | | | | ID |
| | | ID NO: 44) | | | | | | NO: |
| | | | | | | | | 45) |
| PMAB204 | QVQLVQ | ASTKGPSVFPLAPS | GGGGSG | EVQLLESG | GGGGSG | DIQMTQS | DIQMTQS | RTVAA |
| | SGAEVK | SKSTSGGTAALGCL | GGGSGG | GGLVQPGG | GGGSGG | PSSLSAS | PSSLSAS | PSVFI |
| | KPGASV | VKDYFPEPVTVSWN | GGS | SLRLSCAA | GGSGGG | VGDRVTI | VGDRVTI | FPPSD |
| | KVSCKA | SGALTSGVHTFPAV | (SEQ | SGFTFSDE | GS | TCRASQS | TCRASQS | EQLKS |
| | SGYTFS | LQSSGLYSLSSVVT | ID NO: | WMHWVRQA | (SEQ | VSRSLAW | ISNWVAW | GTASV |
| | DHYMHW | VPSSSLGTQTYICN | 30) | PGKGLEWI | ID NO: | YQQKPGK | YQQKPGK | VCLLN |
| | VRQAPG | VNHKPSNTKVDKKV | | SYISGDSG | 22) | APKLLIY | APKLLIY | NFYPR |
| | QGLEWM | EPKSCDKTHTCPPC | | YTNYADSV | | AASSLQS | RASTLQS | EAKVQ |
| | GIIAPS | PAPEAAGAPSVELE | | KGRFTISR | | GVPSRFS | GVPSRFS | WKVDN |
| | GGRTSY | PPKPKDTLMISRTP | | DNSKNTLY | | GSGSGTD | GSGSGTD | ALQSG |
| | AQKFQG | EVTCVVVDVSHEDP | | LQMNSLRA | | FTLTISS | FTLTISS | NSQES |
| | RVTMTR | EVKFNWYVDGVEVH | | EDTAVYYC | | LQPEDFA | LQPEDFA | VTEQD |
| | DTSTST | NAKTKPREEQYNST | | ARDRPYYY | | TYYCQQY | TYYCQQS | SKDST |
| | VYMELS | YRVVSVLTVLHQDW | | YMDVWGKG | | KSYPVTF | HSLPLTF | YSLSS |
| | SLRSED | LNGKEYKCKVSNKA | | TTVTVSS | | GQGTKVE | GPGTKVD | TLTLS |
| | TAVYYC | LPAPIEKTISKAKG | | (SEQ ID | | IK (SEQ | IK (SEQ | KADYE |
| | AADNGH | QPREPQVYTLPPSR | | NO: 591) | | ID NO: | ID NO: | KHKVY |
| | ASGWLY | EEMTKNQVSLTCLV | | | | 592) | 1655) | ACEVT |
| | YYGMDV | KGFYPSDIAVEWES | | | | | | HQGLS |
| | WGQGTT | NGQPENNYKTTPPV | | | | | | SPVTK |
| | VTVSS | LDSDGSFFLYSKLT | | | | | | SFNRG |
| | (SEQ | VDKSRWQQGNVFSC | | | | | | EC |
| | ID NO: | SVMHEALHNHYTQK | | | | | | (SEQ |
| | 1658) | SLSLSPG (SEQ | | | | | | ID |
| | | ID NO: 44) | | | | | | NO: |
| | | | | | | | | 45) |
| PMAB205 | QVQLVQ | ASTKGPSVFPLAPS | GGGGSG | EVQLLESG | GGGGSG | DIQMTQS | DIQMTQS | RTVAA |
| | SGAEVK | SKSTSGGTAALGCL | GGGSGG | GGLVQPGG | GGGSGG | PSSLSAS | PSSLSAS | PSVFI |
| | KPGASV | VKDYFPEPVTVSWN | GGS | SLRLSCAA | GGSGGG | VGDRVTI | VGDRVTI | FPPSD |
| | KVSCKA | SGALTSGVHTFPAV | (SEQ | SGFTFSDE | GS | TCRASQS | TCRASQS | EQLKS |
| | SGYTFS | LQSSGLYSLSSVVT | ID NO: | WMHWVRQA | (SEQ | VSRSLAW | ISNWVAW | GTASV |
| | DHYMHW | VPSSSLGTQTYICN | 30) | PGKGLEWI | ID NO: | YQQKPGK | YQQKPGK | VCLLN |
| | VRQAPG | VNHKPSNTKVDKKV | | SYISGDSG | 22) | APKLLIY | APKLLIY | NFYPR |
| | QGLEWM | EPKSCDKTHTCPPC | | YTNYADSV | | AASSLQS | RASTLQS | EAKVQ |
| | GTIAPS | PAPEAAGAPSVELE | | KGRFTISR | | GVPSRFS | GVPSRFS | WKVDN |
| | GGSTSY | PPKPKDTLMISRTP | | DNSKNTLY | | GSGSGTD | GSGSGTD | ALQSG |
| | AQKFQG | EVTCVVVDVSHEDP | | LQMNSLRA | | FTLTISS | FTLTISS | NSQES |
| | RVTMTR | EVKFNWYVDGVEVH | | EDTAVYYC | | LQPEDFA | LQPEDFA | VTEQD |
| | DTSTST | NAKTKPREEQYNST | | ARDRPYYY | | TYYCQQY | TYYCQQS | SKDST |
| | VYMELS | YRVVSVLTVLHQDW | | YMDVWGKG | | KSYPVTF | HSLPLTF | YSLSS |
| | SLRSED | LNGKEYKCKVSNKA | | TTVTVSS | | GQGTKVE | GPGTKVD | TLTLS |
| | TAVYYC | LPAPIEKTISKAKG | | (SEQ ID | | IK (SEQ | IK (SEQ | KADYE |
| | AADNGH | QPREPQVYTLPPSR | | NO: 591) | | ID NO: | ID NO: | KHKVY |
| | ASGWLY | EEMTKNQVSLTCLV | | | | 592) | 1655) | ACEVT |
| | YYGMDV | KGFYPSDIAVEWES | | | | | | HQGLS |
| | WGQGTT | NGQPENNYKTTPPV | | | | | | SPVTK |
| | VTVSS | LDSDGSFFLYSKLT | | | | | | SFNRG |
| | (SEQ | VDKSRWQQGNVFSC | | | | | | EC |
| | ID NO: | SVMHEALHNHYTQK | | | | | | (SEQ |
| | 1659) | SLSLSPG (SEQ | | | | | | ID |
| | | ID NO: 44) | | | | | | NO: |
| | | | | | | | | 45) |
| PMAB206 | QVQLVQ | ASTKGPSVFPLAPS | GGGGSG | EVQLLESG | GGGGSG | DIQMTQS | DIQMTQS | RTVAA |
| | SGAEVK | SKSTSGGTAALGCL | GGGSGG | GGLVQPGG | GGGSGG | PSSLSAS | PSSLSAS | PSVFI |
| | KPGASV | VKDYFPEPVTVSWN | GGS | SLRLSCAA | GGSGGG | VGDRVTI | VGDRVTI | FPPSD |
| | KVSCKA | SGALTSGVHTFPAV | (SEQ | SGFTFSDE | GS | TCRASQS | TCRASQS | EQLKS |
| | SGYTFT | LQSSGLYSLSSVVT | ID NO: | WMHWVRQA | (SEQ | VSRSLAW | ISNWVAW | GTASV |
| | SYYMHW | VPSSSLGTQTYICN | 30) | PGKGLEWI | ID NO: | YQQKPGK | YQQKPGK | VCLLN |
| | VRQAPG | VNHKPSNTKVDKKV | | SYISGDSG | 22) | APKLLIY | APKLLIY | NFYPR |
| | QGLEWM | EPKSCDKTHTCPPC | | YTNYADSV | | AASSLQS | RASTLQS | EAKVQ |
| | GIIAPS | PAPEAAGAPSVELE | | KGRFTISR | | GVPSRFS | GVPSRFS | WKVDN |
| | GGSTSY | PPKPKDTLMISRTP | | DNSKNTLY | | GSGSGTD | GSGSGTD | ALQSG |
| | AQKFQG | EVTCVVVDVSHEDP | | LQMNSLRA | | FTLTISS | FTLTISS | NSQES |
| | RVTMTR | EVKFNWYVDGVEVH | | EDTAVYYC | | LQPEDFA | LQPEDFA | VTEQD |
| | DTSTST | NAKTKPREEQYNST | | ARDRPYYY | | TYYCQQY | TYYCQQS | SKDST |
| | VYMELS | YRVVSVLTVLHQDW | | YMDVWGKG | | KSYPVTF | HSLPLTF | YSLSS |
| | SLRSED | LNGKEYKCKVSNKA | | TTVTVSS | | GQGTKVE | GPGTKVD | TLTLS |
| | TAVYYC | LPAPIEKTISKAKG | | (SEQ ID | | IK (SEQ | IK (SEQ | KADYE |
| | AADNGH | QPREPQVYTLPPSR | | NO: 591) | | ID NO: | ID NO: | KHKVY |
| | ASGWLY | EEMTKNQVSLTCLV | | | | 592) | 1655) | ACEVT |
| | YYGMDV | KGFYPSDIAVEWES | | | | | | HQGLS |
| | WGQGTT | NGQPENNYKTTPPV | | | | | | SPVTK |
| | VTVSS | LDSDGSFFLYSKLT | | | | | | SFNRG |
| | (SEQ | VDKSRWQQGNVFSC | | | | | | EC |
| | ID NO: | SVMHEALHNHYTQK | | | | | | (SEQ |
| | 1660) | SLSLSPG (SEQ | | | | | | ID |
| | | ID NO: 44) | | | | | | NO: |
| | | | | | | | | 45) |
| PMAB207 | QVQLVQ | ASTKGPSVFPLAPS | GGGGSG | EVQLLESG | GGGGSG | DIQMTQS | DIQMTQS | RTVAA |
| | SGAEVK | SKSTSGGTAALGCL | GGGSGG | GGLVQPGG | GGGSGG | PSSLSAS | PSSLSAS | PSVFI |
| | KPGASV | VKDYFPEPVTVSWN | GGS | SLRLSCAA | GGSGGG | VGDRVTI | VGDRVTI | FPPSD |
| | KVSCKA | SGALTSGVHTFPAV | (SEQ | SGFTFSDE | GS | TCRASQS | TCRASQS | EQLKS |
| | SGYTES | LQSSGLYSLSSVVT | ID NO: | WMHWVRQA | (SEQ | VSRSLAW | ISSWVAW | GTASV |
| | DHYMHW | VPSSSLGTQTYICN | 30) | PGKGLEWI | ID NO: | YQQKPGK | YQQKPGK | VCLLN |
| | VRQAPG | VNHKPSNTKVDKKV | | SYISGDSG | 22) | APKLLIY | APKLLIY | NFYPR |
| | QGLEWM | EPKSCDKTHTCPPC | | YTNYADSV | | AASSLQS | RASTLQS | EAKVQ |
| | GTIAPS | PAPEAAGAPSVELE | | KGRFTISR | | GVPSRFS | GVPSRFS | WKVDN |
| | GGRTSY | PPKPKDTLMISRTP | | DNSKNTLY | | GSGSGTD | GSGSGTD | ALQSG |
| | AQKFQG | EVTCVVVDVSHEDP | | LQMNSLRA | | FTLTISS | FTLTISS | NSQES |
| | RVTMTR | EVKFNWYVDGVEVH | | EDTAVYYC | | LQPEDFA | LQPEDFA | VTEQD |
| | DTSTST | NAKTKPREEQYNST | | ARDRPYYY | | TYYCQQY | TYYCQQS | SKDST |
| | VYMELS | YRVVSVLTVLHQDW | | YMDVWGKG | | KSYPVTF | HSLPLTF | YSLSS |
| | SLRSED | LNGKEYKCKVSNKA | | TTVTVSS | | GQGTKVE | GPGTKVD | TLTLS |
| | TAVYYC | LPAPIEKTISKAKG | | (SEQ ID | | IK (SEQ | IK (SEQ | KADYE |
| | AADNGH | QPREPQVYTLPPSR | | NO: 591) | | ID NO: | ID NO: | KHKVY |
| | ASGWLY | EEMTKNQVSLTCLV | | | | 592) | 1662) | ACEVT |
| | YYGMDV | KGFYPSDIAVEWES | | | | | | HQGLS |
| | WGQGTT | NGQPENNYKTTPPV | | | | | | SPVTK |
| | VTVSS | LDSDGSFFLYSKLT | | | | | | SFNRG |
| | (SEQ | VDKSRWQQGNVFSC | | | | | | EC |
| | ID NO: | SVMHEALHNHYTQK | | | | | | (SEQ |
| | 1661) | SLSLSPG (SEQ | | | | | | ID |
| | | ID NO: 44) | | | | | | NO: |
| | | | | | | | | 45) |
| PMAB208 | QVQLVQ | ASTKGPSVFPLAPS | GGGGSG | EVQLLESG | GGGGSG | DIQMTQS | DIQMTQS | RTVAA |
| | SGAEVK | SKSTSGGTAALGCL | GGGSGG | GGLVQPGG | GGGSGG | PSSLSAS | PSSLSAS | PSVFI |
| | KPGASV | VKDYFPEPVTVSWN | GGS | SLRLSCAA | GGSGGG | VGDRVTI | VGDRVTI | FPPSD |
| | KVSCKA | SGALTSGVHTFPAV | (SEQ | SGFTFSDE | GS | TCRASQS | TCRASQS | EQLKS |
| | SGYTES | LQSSGLYSLSSVVT | ID NO: | WMHWVRQA | (SEQ | VSRSLAW | ISNYVAW | GTASV |
| | DHYMHW | VPSSSLGTQTYICN | 30) | PGKGLEWI | ID NO: | YQQKPGK | YQQKPGK | VCLLN |
| | VRQAPG | VNHKPSNTKVDKKV | | SYISGDSG | 22) | APKLLIY | APKLLIY | NFYPR |
| | QGLEWM | EPKSCDKTHTCPPC | | YTNYADSV | | AASSLQS | RASTLQS | EAKVQ |
| | GTIAPS | PAPEAAGAPSVELE | | KGRFTISR | | GVPSRFS | GVPSRFS | WKVDN |
| | GGRTSY | PPKPKDTLMISRTP | | DNSKNTLY | | GSGSGTD | GSGSGTD | ALQSG |
| | AQKFQG | EVTCVVVDVSHEDP | | LQMNSLRA | | FTLTISS | FTLTISS | NSQES |
| | RVTMTR | EVKFNWYVDGVEVH | | EDTAVYYC | | LQPEDFA | LQPEDFA | VTEQD |
| | DTSTST | NAKTKPREEQYNST | | ARDRPYYY | | TYYCQQY | TYYCQQS | SKDST |
| | VYMELS | YRVVSVLTVLHQDW | | YMDVWGKG | | KSYPVTF | HSLPLTF | YSLSS |
| | SLRSED | LNGKEYKCKVSNKA | | TTVTVSS | | GQGTKVE | GPGTKVD | TLTLS |
| | TAVYYC | LPAPIEKTISKAKG | | (SEQ ID | | IK (SEQ | IK (SEQ | KADYE |
| | AADNGH | QPREPQVYTLPPSR | | NO: 591) | | ID NO: | ID NO: | KHKVY |
| | ASGWLY | EEMTKNQVSLTCLV | | | | 592) | 1663) | ACEVT |
| | YYGMDV | KGFYPSDIAVEWES | | | | | | HQGLS |
| | WGQGTT | NGQPENNYKTTPPV | | | | | | SPVTK |
| | VTVSS | LDSDGSFFLYSKLT | | | | | | SFNRG |
| | (SEQ | VDKSRWQQGNVFSC | | | | | | EC |
| | ID NO: | SVMHEALHNHYTQK | | | | | | (SEQ |
| | 1661) | SLSLSPG (SEQ | | | | | | ID |
| | | ID NO: 44) | | | | | | NO: |
| | | | | | | | | 45) |
| PMAB209 | QVQLVQ | ASTKGPSVFPLAPS | GGGGSG | EVQLLESG | GGGGSG | DIQMTQS | DIQMTQS | RTVAA |
| | SGAEVK | SKSTSGGTAALGCL | GGGSGG | GGLVQPGG | GGGSGG | PSSLSAS | PSSLSAS | PSVFI |
| | KPGASV | VKDYFPEPVTVSWN | GGS | SLRLSCAA | GGSGGG | VGDRVTI | VGDRVTI | FPPSD |
| | KVSCKA | SGALTSGVHTFPAV | (SEQ | SGFTFSDE | GS | TCRASQS | TCRASQS | EQLKS |
| | SGYTES | LQSSGLYSLSSVVT | ID NO: | WMHWVRQA | (SEQ | VSRSLAW | ISNWLAW | GTASV |
| | DHYMHW | VPSSSLGTQTYICN | 30) | PGKGLEWI | ID NO: | YQQKPGK | YQQKPGK | VCLLN |
| | VRQAPG | VNHKPSNTKVDKKV | | SYISGDSG | 22) | APKLLIY | APKLLIY | NFYPR |
| | QGLEWM | EPKSCDKTHTCPPC | | YTNYADSV | | AASSLQS | RASTLQS | EAKVQ |
| | GTIAPS | PAPEAAGAPSVELE | | KGRFTISR | | GVPSRFS | GVPSRFS | WKVDN |
| | GGRTSY | PPKPKDTLMISRTP | | DNSKNTLY | | GSGSGTD | GSGSGTD | ALQSG |
| | AQKFQG | EVTCVVVDVSHEDP | | LQMNSLRA | | FTLTISS | FTLTISS | NSQES |
| | RVTMTR | EVKFNWYVDGVEVH | | EDTAVYYC | | LQPEDFA | LQPEDFA | VTEQD |
| | DTSTST | NAKTKPREEQYNST | | ARDRPYYY | | TYYCQQY | TYYCQQS | SKDST |
| | VYMELS | YRVVSVLTVLHQDW | | YMDVWGKG | | KSYPVTF | HSLPLTF | YSLSS |
| | SLRSED | LNGKEYKCKVSNKA | | TTVTVSS | | GQGTKVE | GPGTKVD | TLTLS |
| | TAVYYC | LPAPIEKTISKAKG | | (SEQ ID | | IK (SEQ | IK (SEQ | KADYE |
| | AADNGH | QPREPQVYTLPPSR | | NO: 591) | | ID NO: | ID NO: | KHKVY |
| | ASGWLY | EEMTKNQVSLTCLV | | | | 592) | 1664) | ACEVT |
| | YYGMDV | KGFYPSDIAVEWES | | | | | | HQGLS |
| | WGQGTT | NGQPENNYKTTPPV | | | | | | SPVTK |
| | VTVSS | LDSDGSFFLYSKLT | | | | | | SFNRG |
| | (SEQ | VDKSRWQQGNVFSC | | | | | | EC |
| | ID NO: | SVMHEALHNHYTQK | | | | | | (SEQ |
| | 1661) | SLSLSPG (SEQ | | | | | | ID |
| | | ID NO: 44) | | | | | | NO: |
| | | | | | | | | 45) |
| PMAB210 | QVQLVQ | ASTKGPSVFPLAPS | GGGGSG | EVQLLESG | GGGGSG | DIQMTQS | DIQMTQS | RTVAA |
| | SGAEVK | SKSTSGGTAALGCL | GGGSGG | GGLVQPGG | GGGSGG | PSSLSAS | PSSLSAS | PSVFI |
| | KPGASV | VKDYFPEPVTVSWN | GGS | SLRLSCAA | GGSGGG | VGDRVTI | VGDRVTI | FPPSD |
| | KVSCKA | SGALTSGVHTFPAV | (SEQ | SGFTFSDE | GS | TCRASQS | TCRASQS | EQLKS |
| | SGYTES | LQSSGLYSLSSVVT | ID NO: | WMHWVRQA | (SEQ | VSRSLAW | ISNWVNW | GTASV |
| | DHYMHW | VPSSSLGTQTYICN | 30) | PGKGLEWI | ID NO: | YQQKPGK | YQQKPGK | VCLLN |
| | VRQAPG | VNHKPSNTKVDKKV | | SYISGDSG | 22) | APKLLIY | APKLLIY | NFYPR |
| | QGLEWM | EPKSCDKTHTCPPC | | YTNYADSV | | AASSLQS | RASTLQS | EAKVQ |
| | GTIAPS | PAPEAAGAPSVELE | | KGRFTISR | | GVPSRFS | GVPSRFS | WKVDN |
| | GGRTSY | PPKPKDTLMISRTP | | DNSKNTLY | | GSGSGTD | GSGSGTD | ALQSG |
| | AQKFQG | EVTCVVVDVSHEDP | | LQMNSLRA | | FTLTISS | FTLTISS | NSQES |
| | RVTMTR | EVKFNWYVDGVEVH | | EDTAVYYC | | LQPEDFA | LQPEDFA | VTEQD |
| | DTSTST | NAKTKPREEQYNST | | ARDRPYYY | | TYYCQQY | TYYCQQS | SKDST |
| | VYMELS | YRVVSVLTVLHQDW | | YMDVWGKG | | KSYPVTF | HSLPLTF | YSLSS |
| | SLRSED | LNGKEYKCKVSNKA | | TTVTVSS | | GQGTKVE | GPGTKVD | TLTLS |
| | TAVYYC | LPAPIEKTISKAKG | | (SEQ ID | | IK (SEQ | IK (SEQ | KADYE |
| | AADNGH | QPREPQVYTLPPSR | | NO: 591) | | ID NO: | ID NO: | KHKVY |
| | ASGWLY | EEMTKNQVSLTCLV | | | | 592) | 1665) | ACEVT |
| | YYGMDV | KGFYPSDIAVEWES | | | | | | HQGLS |
| | WGQGTT | NGQPENNYKTTPPV | | | | | | SPVTK |
| | VTVSS | LDSDGSFFLYSKLT | | | | | | SFNRG |
| | (SEQ | VDKSRWQQGNVFSC | | | | | | EC |
| | ID NO: | SVMHEALHNHYTQK | | | | | | (SEQ |
| | 1661) | SLSLSPG (SEQ | | | | | | ID |
| | | ID NO: 44) | | | | | | NO: |
| | | | | | | | | 45) |
| PMAB211 | QVQLVQ | ASTKGPSVFPLAPS | GGGGSG | EVQLLESG | GGGGSG | DIQMTQS | DIQMTQS | RTVAA |
| | SGAEVK | SKSTSGGTAALGCL | GGGSGG | GGLVQPGG | GGGSGG | PSSLSAS | PSSLSAS | PSVFI |
| | KPGASV | VKDYFPEPVTVSWN | GGS | SLRLSCAA | GGSGGG | VGDRVTI | VGDRVTI | FPPSD |
| | KVSCKA | SGALTSGVHTFPAV | (SEQ | SGFTFSDE | GS | TCRASQS | TCRASQS | EQLKS |
| | SGYTES | LQSSGLYSLSSVVT | ID NO: | WMHWVRQA | (SEQ | VSRSLAW | ISNWVAW | GTASV |
| | DHYMHW | VPSSSLGTQTYICN | 30) | PGKGLEWI | ID NO: | YQQKPGK | YQQKPGK | VCLLN |
| | VRQAPG | VNHKPSNTKVDKKV | | SYISGDSG | 22) | APKLLIY | APKLLIY | NFYPR |
| | QGLEWM | EPKSCDKTHTCPPC | | YTNYADSV | | AASSLQS | AASTLQS | EAKVQ |
| | GTIAPS | PAPEAAGAPSVELE | | KGRFTISR | | GVPSRFS | GVPSRFS | WKVDN |
| | GGRTSY | PPKPKDTLMISRTP | | DNSKNTLY | | GSGSGTD | GSGSGTD | ALQSG |
| | AQKFQG | EVTCVVVDVSHEDP | | LQMNSLRA | | FTLTISS | FTLTISS | NSQES |
| | RVTMTR | EVKFNWYVDGVEVH | | EDTAVYYC | | LQPEDFA | LQPEDFA | VTEQD |
| | DTSTST | NAKTKPREEQYNST | | ARDRPYYY | | TYYCQQY | TYYCQQS | SKDST |
| | VYMELS | YRVVSVLTVLHQDW | | YMDVWGKG | | KSYPVTF | HSLPLTF | YSLSS |
| | SLRSED | LNGKEYKCKVSNKA | | TTVTVSS | | GQGTKVE | GPGTKVD | TLTLS |
| | TAVYYC | LPAPIEKTISKAKG | | (SEQ ID | | IK (SEQ | IK (SEQ | KADYE |
| | AADNGH | QPREPQVYTLPPSR | | NO: 591) | | ID NO: | ID NO: | KHKVY |
| | ASGWLY | EEMTKNQVSLTCLV | | | | 592) | 1666) | ACEVT |
| | YYGMDV | KGFYPSDIAVEWES | | | | | | HQGLS |
| | WGQGTT | NGQPENNYKTTPPV | | | | | | SPVTK |
| | VTVSS | LDSDGSFFLYSKLT | | | | | | SFNRG |
| | (SEQ | VDKSRWQQGNVFSC | | | | | | EC |
| | ID NO: | SVMHEALHNHYTQK | | | | | | (SEQ |
| | 1661) | SLSLSPG (SEQ | | | | | | ID |
| | | ID NO: 44) | | | | | | NO: |
| | | | | | | | | 45) |
| PMAB212 | QVQLVQ | ASTKGPSVFPLAPS | GGGGSG | EVQLLESG | GGGGSG | DIQMTQS | DIQMTQS | RTVAA |
| | SGAEVK | SKSTSGGTAALGCL | GGGSGG | GGLVQPGG | GGGSGG | PSSLSAS | PSSLSAS | PSVFI |
| | KPGASV | VKDYFPEPVTVSWN | GGS | SLRLSCAA | GGSGGG | VGDRVTI | VGDRVTI | FPPSD |
| | KVSCKA | SGALTSGVHTFPAV | (SEQ | SGFTFSDE | GS | TCRASQS | TCRASQS | EQLKS |
| | SGYTES | LQSSGLYSLSSVVT | ID NO: | WMHWVRQA | (SEQ | VSRSLAW | ISNWVAW | GTASV |
| | DHYMHW | VPSSSLGTQTYICN | 30) | PGKGLEWI | ID NO: | YQQKPGK | YQQKPGK | VCLLN |
| | VRQAPG | VNHKPSNTKVDKKV | | SYISGDSG | 22) | APKLLIY | APKLLIY | NFYPR |
| | QGLEWM | EPKSCDKTHTCPPC | | YTNYADSV | | AASSLQS | RASSLQS | EAKVQ |
| | GTIAPS | PAPEAAGAPSVELE | | KGRFTISR | | GVPSRFS | GVPSRFS | WKVDN |
| | GGRTSY | PPKPKDTLMISRTP | | DNSKNTLY | | GSGSGTD | GSGSGTD | ALQSG |
| | AQKFQG | EVTCVVVDVSHEDP | | LQMNSLRA | | FTLTISS | FTLTISS | NSQES |
| | RVTMTR | EVKFNWYVDGVEVH | | EDTAVYYC | | LQPEDFA | LQPEDFA | VTEQD |
| | DTSTST | NAKTKPREEQYNST | | ARDRPYYY | | TYYCQQY | TYYCQQS | SKDST |
| | VYMELS | YRVVSVLTVLHQDW | | YMDVWGKG | | KSYPVTF | HSLPLTF | YSLSS |
| | SLRSED | LNGKEYKCKVSNKA | | TTVTVSS | | GQGTKVE | GPGTKVD | TLTLS |
| | TAVYYC | LPAPIEKTISKAKG | | (SEQ ID | | IK (SEQ | IK (SEQ | KADYE |
| | AADNGH | QPREPQVYTLPPSR | | NO: 591) | | ID NO: | ID NO: | KHKVY |
| | ASGWLY | EEMTKNQVSLTCLV | | | | 592) | 1667) | ACEVT |
| | YYGMDV | KGFYPSDIAVEWES | | | | | | HQGLS |
| | WGQGTT | NGQPENNYKTTPPV | | | | | | SPVTK |
| | VTVSS | LDSDGSFFLYSKLT | | | | | | SFNRG |
| | (SEQ | VDKSRWQQGNVFSC | | | | | | EC |
| | ID NO: | SVMHEALHNHYTQK | | | | | | (SEQ |
| | 1661) | SLSLSPG (SEQ | | | | | | ID |
| | | ID NO: 44) | | | | | | NO: |
| | | | | | | | | 45) |
| PMAB213 | QVQLVQ | ASTKGPSVFPLAPS | GGGGSG | EVQLLESG | GGGGSG | DIQMTQS | DIQMTQS | RTVAA |
| | SGAEVK | SKSTSGGTAALGCL | GGGSGG | GGLVQPGG | GGGSGG | PSSLSAS | PSSLSAS | PSVFI |
| | KPGASV | VKDYFPEPVTVSWN | GGS | SLRLSCAA | GGSGGG | VGDRVTI | VGDRVTI | FPPSD |
| | KVSCKA | SGALTSGVHTFPAV | (SEQ | SGFTFSDE | GS | TCRASQS | TCRASQS | EQLKS |
| | SGYTES | LQSSGLYSLSSVVT | ID NO: | WMHWVRQA | (SEQ | VSRSLAW | ISNWVAW | GTASV |
| | DHYMHW | VPSSSLGTQTYICN | 30) | PGKGLEWI | ID NO: | YQQKPGK | YQQKPGK | VCLLN |
| | VRQAPG | VNHKPSNTKVDKKV | | SYISGDSG | 22) | APKLLIY | APKLLIY | NFYPR |
| | QGLEWM | EPKSCDKTHTCPPC | | YTNYADSV | | AASSLQS | RASTLQS | EAKVQ |
| | GTIAPS | PAPEAAGAPSVELE | | KGRFTISR | | GVPSRFS | GVPSRFS | WKVDN |
| | GGRTSY | PPKPKDTLMISRTP | | DNSKNTLY | | GSGSGTD | GSGSGTD | ALQSG |
| | AQKFQG | EVTCVVVDVSHEDP | | LQMNSLRA | | FTLTISS | FTLTISS | NSQES |
| | RVTMTR | EVKFNWYVDGVEVH | | EDTAVYYC | | LQPEDFA | LQPEDFA | VTEQD |
| | DTSTST | NAKTKPREEQYNST | | ARDRPYYY | | TYYCQQY | TYYCQQS | SKDST |
| | VYMELS | YRVVSVLTVLHQDW | | YMDVWGKG | | KSYPVTF | YSLPLTF | YSLSS |
| | SLRSED | LNGKEYKCKVSNKA | | TTVTVSS | | GQGTKVE | GPGTKVD | TLTLS |
| | TAVYYC | LPAPIEKTISKAKG | | (SEQ ID | | IK (SEQ | IK (SEQ | KADYE |
| | AADNGH | QPREPQVYTLPPSR | | NO: 591) | | ID NO: | ID NO: | KHKVY |
| | ASGWLY | EEMTKNQVSLTCLV | | | | 592) | 1668) | ACEVT |
| | YYGMDV | KGFYPSDIAVEWES | | | | | | HQGLS |
| | WGQGTT | NGQPENNYKTTPPV | | | | | | SPVTK |
| | VTVSS | LDSDGSFFLYSKLT | | | | | | SFNRG |
| | (SEQ | VDKSRWQQGNVFSC | | | | | | EC |
| | ID NO: | SVMHEALHNHYTQK | | | | | | (SEQ |
| | 1661) | SLSLSPG (SEQ | | | | | | ID |
| | | ID NO: 44) | | | | | | NO: |
| | | | | | | | | 45) |
| PMAB214 | QVQLVQ | ASTKGPSVFPLAPS | GGGGSG | EVQLLESG | GGGGSG | DIQMTQS | DIQMTQS | RTVAA |
| | SGAEVK | SKSTSGGTAALGCL | GGGSGG | GGLVQPGG | GGGSGG | PSSLSAS | PSSLSAS | PSVFI |
| | KPGASV | VKDYFPEPVTVSWN | GGS | SLRLSCAA | GGSGGG | VGDRVTI | VGDRVTI | FPPSD |
| | KVSCKA | SGALTSGVHTFPAV | (SEQ | SGFTFSDE | GS | TCRASQS | TCRASQS | EQLKS |
| | SGYTES | LQSSGLYSLSSVVT | ID NO: | WMHWVRQA | (SEQ | VSRSLAW | ISNWVAW | GTASV |
| | DHYMHW | VPSSSLGTQTYICN | 30) | PGKGLEWI | ID NO: | YQQKPGK | YQQKPGK | VCLLN |
| | VRQAPG | VNHKPSNTKVDKKV | | SYISGDSG | 22) | APKLLIY | APKLLIY | NFYPR |
| | QGLEWM | EPKSCDKTHTCPPC | | YTNYADSV | | AASSLQS | RASTLQS | EAKVQ |
| | GTIAPS | PAPEAAGAPSVELE | | KGRFTISR | | GVPSRFS | GVPSRFS | WKVDN |
| | GGRTSY | PPKPKDTLMISRTP | | DNSKNTLY | | GSGSGTD | GSGSGTD | ALQSG |
| | AQKFQG | EVTCVVVDVSHEDP | | LQMNSLRA | | FTLTISS | FTLTISS | NSQES |
| | RVTMTR | EVKFNWYVDGVEVH | | EDTAVYYC | | LQPEDFA | LQPEDFA | VTEQD |
| | DTSTST | NAKTKPREEQYNST | | ARDRPYYY | | TYYCQQY | TYYCQQS | SKDST |
| | VYMELS | YRVVSVLTVLHQDW | | YMDVWGKG | | KSYPVTF | HSTPLTF | YSLSS |
| | SLRSED | LNGKEYKCKVSNKA | | TTVTVSS | | GQGTKVE | GPGTKVD | TLTLS |
| | TAVYYC | LPAPIEKTISKAKG | | (SEQ ID | | IK (SEQ | IK (SEQ | KADYE |
| | AADNGH | QPREPQVYTLPPSR | | NO: 591) | | ID NO: | ID NO: | KHKVY |
| | ASGWLY | EEMTKNQVSLTCLV | | | | 592) | 1669) | ACEVT |
| | YYGMDV | KGFYPSDIAVEWES | | | | | | HQGLS |
| | WGQGTT | NGQPENNYKTTPPV | | | | | | SPVTK |
| | VTVSS | LDSDGSFFLYSKLT | | | | | | SFNRG |
| | (SEQ | VDKSRWQQGNVFSC | | | | | | EC |
| | ID NO: | SVMHEALHNHYTQK | | | | | | (SEQ |
| | 1661) | SLSLSPG (SEQ | | | | | | ID |
| | | ID NO: 44) | | | | | | NO: |
| | | | | | | | | 45) |
| PMAB215 | QVQLVQ | ASTKGPSVFPLAPS | GGGGSG | EVQLLESG | GGGGSG | DIQMTQS | DIQMTQS | RTVAA |
| | SGAEVK | SKSTSGGTAALGCL | GGGSGG | GGLVQPGG | GGGSGG | PSSLSAS | PSSLSAS | PSVFI |
| | KPGASV | VKDYFPEPVTVSWN | GGS | SLRLSCAA | GGSGGG | VGDRVTI | VGDRVTI | FPPSD |
| | KVSCKA | SGALTSGVHTFPAV | (SEQ | SGFTFSDE | GS | TCRASQS | TCRASQS | EQLKS |
| | SGYTES | LQSSGLYSLSSVVT | ID NO: | WMHWVRQA | (SEQ | VSRSLAW | ISNWVAW | GTASV |
| | DHYMHW | VPSSSLGTQTYICN | 30) | PGKGLEWI | ID NO: | YQQKPGK | YQQKPGK | VCLLN |
| | VRQAPG | VNHKPSNTKVDKKV | | SYISGDSG | 22) | APKLLIY | APKLLIY | NFYPR |
| | QGLEWM | EPKSCDKTHTCPPC | | YTNYADSV | | AASSLQS | RASTLQS | EAKVQ |
| | GTIAPS | PAPEAAGAPSVELE | | KGRFTISR | | GVPSRFS | GVPSRFS | WKVDN |
| | GGRTSY | PPKPKDTLMISRTP | | DNSKNTLY | | GSGSGTD | GSGSGTD | ALQSG |
| | AQKFQG | EVTCVVVDVSHEDP | | LQMNSLRA | | FTLTISS | FTLTISS | NSQES |
| | RVTMTR | EVKFNWYVDGVEVH | | EDTAVYYC | | LQPEDFA | LQPEDFA | VTEQD |
| | DTSTST | NAKTKPREEQYNST | | ARDRPYYY | | TYYCQQY | TYYCQQS | SKDST |
| | VYMELS | YRVVSVLTVLHQDW | | YMDVWGKG | | KSYPVTF | HSLPRTF | YSLSS |
| | SLRSED | LNGKEYKCKVSNKA | | TTVTVSS | | GQGTKVE | GPGTKVD | TLTLS |
| | TAVYYC | LPAPIEKTISKAKG | | (SEQ ID | | IK (SEQ | IK (SEQ | KADYE |
| | AADNGH | QPREPQVYTLPPSR | | NO: 591) | | ID NO: | ID NO: | KHKVY |
| | ASGWLY | EEMTKNQVSLTCLV | | | | 592) | 1670) | ACEVT |
| | YYGMDV | KGFYPSDIAVEWES | | | | | | HQGLS |
| | WGQGTT | NGQPENNYKTTPPV | | | | | | SPVTK |
| | VTVSS | LDSDGSFFLYSKLT | | | | | | SFNRG |
| | (SEQ | VDKSRWQQGNVFSC | | | | | | EC |
| | ID NO: | SVMHEALHNHYTQK | | | | | | (SEQ |
| | 1661) | SLSLSPG (SEQ | | | | | | ID |
| | | ID NO: 44) | | | | | | NO: |
| | | | | | | | | 45) |
| PMAB216 | QVQLVQ | ASTKGPSVFPLAPS | GGGGSG | EVQLLESG | GGGGSG | DIQMTQS | DIQMTQS | RTVAA |
| | SGAEVK | SKSTSGGTAALGCL | GGGSGG | GGLVQPGG | GGGSGG | PSSLSAS | PSSLSAS | PSVFI |
| | KPGASV | VKDYFPEPVTVSWN | GGS | SLRLSCAA | GGSGGG | VGDRVTI | VGDRVTI | FPPSD |
| | KVSCKA | SGALTSGVHTFPAV | (SEQ | SGFTFSDE | GS | TCRASQS | TCRASQS | EQLKS |
| | SGYTES | LQSSGLYSLSSVVT | ID NO: | WMHWVRQA | (SEQ | VSRSLAW | ISSYLNW | GTASV |
| | DHYMHW | VPSSSLGTQTYICN | 30) | PGKGLEWI | ID NO: | YQQKPGK | YQQKPGK | VCLLN |
| | VRQAPG | VNHKPSNTKVDKKV | | SYISGDSG | 22) | APKLLIY | APKLLIY | NFYPR |
| | QGLEWM | EPKSCDKTHTCPPC | | YTNYADSV | | AASSLQS | AASSLQS | EAKVQ |
| | GTIAPS | PAPEAAGAPSVELE | | KGRFTISR | | GVPSRFS | GVPSRFS | WKVDN |
| | GGRTSY | PPKPKDTLMISRTP | | DNSKNTLY | | GSGSGTD | GSGSGTD | ALQSG |
| | AQKFQG | EVTCVVVDVSHEDP | | LQMNSLRA | | FTLTISS | FTLTISS | NSQES |
| | RVTMTR | EVKFNWYVDGVEVH | | EDTAVYYC | | LQPEDFA | LQPEDFA | VTEQD |
| | DTSTST | NAKTKPREEQYNST | | ARDRPYYY | | TYYCQQY | TYYCQQS | SKDST |
| | VYMELS | YRVVSVLTVLHQDW | | YMDVWGKG | | KSYPVTF | YSTPRTF | YSLSS |
| | SLRSED | LNGKEYKCKVSNKA | | TTVTVSS | | GQGTKVE | GPGTKVD | TLTLS |
| | TAVYYC | LPAPIEKTISKAKG | | (SEQ ID | | IK (SEQ | IK (SEQ | KADYE |
| | AADNGH | QPREPQVYTLPPSR | | NO: 591) | | ID NO: | ID NO: | KHKVY |
| | ASGWLY | EEMTKNQVSLTCLV | | | | 592) | 1596) | ACEVT |
| | YYGMDV | KGFYPSDIAVEWES | | | | | | HQGLS |
| | WGQGTT | NGQPENNYKTTPPV | | | | | | SPVTK |
| | VTVSS | LDSDGSFFLYSKLT | | | | | | SFNRG |
| | (SEQ | VDKSRWQQGNVFSC | | | | | | EC |
| | ID NO: | SVMHEALHNHYTQK | | | | | | (SEQ |
| | 1661) | SLSLSPG (SEQ | | | | | | ID |
| | | ID NO: 44) | | | | | | NO: |
| | | | | | | | | 45) |
| PMAB217 | QVQLVQ | ASTKGPSVFPLAPS | GGGGSG | EVQLLESG | GGGGSG | DIQMTQS | DIQMTQS | RTVAA |
| | SGAEVK | SKSTSGGTAALGCL | GGGSGG | GGLVQPGG | GGGSGG | PSSLSAS | PSSLSAS | PSVFI |
| | KPGASV | VKDYFPEPVTVSWN | GGS | SLRLSCAA | GGSGGG | VGDRVTI | VGDRVTI | FPPSD |
| | KVSCKA | SGALTSGVHTFPAV | (SEQ | SGFTFSDE | GS | TCRASQS | TCRASQS | EQLKS |
| | SGYTES | LQSSGLYSLSSVVT | ID NO: | WMHWVRQA | (SEQ | VSRSLAW | ISNWVAW | GTASV |
| | DHYMHW | VPSSSLGTQTYICN | 30) | PGKGLEWI | ID NO: | YQQKPGK | YQQKPGK | VCLLN |
| | VRQAPG | VNHKPSNTKVDKKV | | SYISGDSG | 22) | APKLLIY | APKLLIY | NFYPR |
| | QGLEWM | EPKSCDKTHTCPPC | | YTNYADSV | | AASSLQS | RASTLQS | EAKVQ |
| | GTIAPS | PAPEAAGAPSVELE | | KGRFTISR | | GVPSRFS | GVPSRFS | WKVDN |
| | GGRTSY | PPKPKDTLMISRTP | | DNSKNTLY | | GSGSGTD | GSGSGTD | ALQSG |
| | AQKFQG | EVTCVVVDVSHEDP | | LQMNSLRA | | FTLTISS | FTLTISS | NSQES |
| | RVTMTR | EVKFNWYVDGVEVH | | EDTAVYYC | | LQPEDFA | LQPEDFA | VTEQD |
| | DTSTST | NAKTKPREEQYNST | | ARDRPYYY | | TYYCQQY | TYYCQQS | SKDST |
| | VYMELS | YRVVSVLTVLHQDW | | YMDVWGKG | | KSYPVTF | HSLPLTF | YSLSS |
| | SLRSED | LNGKEYKCKVSNKA | | TTVTVSS | | GQGTKVE | GPGTKVD | TLTLS |
| | TAVYYC | LPAPIEKTISKAKG | | (SEQ ID | | IK (SEQ | IK (SEQ | KADYE |
| | AADNGH | QPREPQVYTLPPSR | | NO: 591) | | ID NO: | ID NO: | KHKVY |
| | ASGWLY | EEMTKNQVSLTCLV | | | | 592) | 1655) | ACEVT |
| | YYGMDV | KGFYPSDIAVEWES | | | | | | HQGLS |
| | WGQGTT | NGQPENNYKTTPPV | | | | | | SPVTK |
| | VTVSS | LDSDGSFFLYSKLT | | | | | | SFNRG |
| | (SEQ | VDKSRWQQGNVFSC | | | | | | EC |
| | ID NO: | SVMHEALHNHYTQK | | | | | | (SEQ |
| | 1661) | SLSLSPG (SEQ | | | | | | ID |
| | | ID NO: 44) | | | | | | NO: |
| | | | | | | | | 45) |
| PMAB218 | QVQLVQ | ASTKGPSVFPLAPS | GGGGSG | EVQLLESG | GGGGSG | DIQMTQS | DIQMTQS | RTVAA |
| | SGAEVK | SKSTSGGTAALGCL | GGGSGG | GGLVQPGG | GGGSGG | PSSLSAS | PSSLSAS | PSVFI |
| | KPGASV | VKDYFPEPVTVSWN | GGS | SLRLSCAA | GGSGGG | VGDRVTI | VGDRVTI | FPPSD |
| | KVSCKA | SGALTSGVHTFPAV | (SEQ | SGFTFSDE | GS | TCRASQS | TCRASQS | EQLKS |
| | SGYTFT | LQSSGLYSLSSVVT | ID NO: | WMHWVRQA | (SEQ | VSRSLAW | ISNWVAW | GTASV |
| | SHYMHW | VPSSSLGTQTYICN | 30) | PGKGLEWI | ID NO: | YQQKPGK | YQQKPGK | VCLLN |
| | VRQAPG | VNHKPSNTKVDKKV | | SYISGDSG | 22) | APKLLIY | APKLLIY | NFYPR |
| | QGLEWM | EPKSCDKTHTCPPC | | YTNYADSV | | AASSLQS | RASTLQS | EAKVQ |
| | GTIAPS | PAPEAAGAPSVELE | | KGRFTISR | | GVPSRFS | GVPSRFS | WKVDN |
| | GGRTSY | PPKPKDTLMISRTP | | DNSKNTLY | | GSGSGTD | GSGSGTD | ALQSG |
| | AQKFQG | EVTCVVVDVSHEDP | | LQMNSLRA | | FTLTISS | FTLTISS | NSQES |
| | RVTMTR | EVKFNWYVDGVEVH | | EDTAVYYC | | LQPEDFA | LQPEDFA | VTEQD |
| | DTSTST | NAKTKPREEQYNST | | ARDRPYYY | | TYYCQQY | TYYCQQS | SKDST |
| | VYMELS | YRVVSVLTVLHQDW | | YMDVWGKG | | KSYPVTF | HSLPLTF | YSLSS |
| | SLRSED | LNGKEYKCKVSNKA | | TTVTVSS | | GQGTKVE | GPGTKVD | TLTLS |
| | TAVYYC | LPAPIEKTISKAKG | | (SEQ ID | | IK (SEQ | IK (SEQ | KADYE |
| | AADNGH | QPREPQVYTLPPSR | | NO: 591) | | ID NO: | ID NO: | KHKVY |
| | ASGWLY | EEMTKNQVSLTCLV | | | | 592) | 1655) | ACEVT |
| | YYGMDV | KGFYPSDIAVEWES | | | | | | HQGLS |
| | WGQGTT | NGQPENNYKTTPPV | | | | | | SPVTK |
| | VTVSS | LDSDGSFFLYSKLT | | | | | | SFNRG |
| | (SEQ | VDKSRWQQGNVFSC | | | | | | EC |
| | ID NO: | SVMHEALHNHYTQK | | | | | | (SEQ |
| | 1671) | SLSLSPG (SEQ | | | | | | ID |
| | | ID NO: 44) | | | | | | NO: |
| | | | | | | | | 45) |
| PMAB219 | QVQLVQ | ASTKGPSVFPLAPS | GGGGSG | EVQLLESG | GGGGSG | DIQMTQS | DIQMTQS | RTVAA |
| | SGAEVK | SKSTSGGTAALGCL | GGGSGG | GGLVQPGG | GGGSGG | PSSLSAS | PSSLSAS | PSVFI |
| | KPGASV | VKDYFPEPVTVSWN | GGS | SLRLSCAA | GGSGGG | VGDRVTI | VGDRVTI | FPPSD |
| | KVSCKA | SGALTSGVHTFPAV | (SEQ | SGFTFSDE | GS | TCRASQS | TCRASQS | EQLKS |
| | SGYTFT | LQSSGLYSLSSVVT | ID NO: | WMHWVRQA | (SEQ | VSRSLAW | ISNWVAW | GTASV |
| | DYYMHW | VPSSSLGTQTYICN | 30) | PGKGLEWI | ID NO: | YQQKPGK | YQQKPGK | VCLLN |
| | VRQAPG | VNHKPSNTKVDKKV | | SYISGDSG | 22) | APKLLIY | APKLLIY | NFYPR |
| | QGLEWM | EPKSCDKTHTCPPC | | YTNYADSV | | AASSLQS | RASTLQS | EAKVQ |
| | GTIAPS | PAPEAAGAPSVELE | | KGRFTISR | | GVPSRFS | GVPSRFS | WKVDN |
| | GGRTSY | PPKPKDTLMISRTP | | DNSKNTLY | | GSGSGTD | GSGSGTD | ALQSG |
| | AQKFQG | EVTCVVVDVSHEDP | | LQMNSLRA | | FTLTISS | FTLTISS | NSQES |
| | RVTMTR | EVKFNWYVDGVEVH | | EDTAVYYC | | LQPEDFA | LQPEDFA | VTEQD |
| | DTSTST | NAKTKPREEQYNST | | ARDRPYYY | | TYYCQQY | TYYCQQS | SKDST |
| | VYMELS | YRVVSVLTVLHQDW | | YMDVWGKG | | KSYPVTF | HSLPLTF | YSLSS |
| | SLRSED | LNGKEYKCKVSNKA | | TTVTVSS | | GQGTKVE | GPGTKVD | TLTLS |
| | TAVYYC | LPAPIEKTISKAKG | | (SEQ ID | | IK (SEQ | IK (SEQ | KADYE |
| | AADNGH | QPREPQVYTLPPSR | | NO: 591) | | ID NO: | ID NO: | KHKVY |
| | ASGWLY | EEMTKNQVSLTCLV | | | | 592) | 1655) | ACEVT |
| | YYGMDV | KGFYPSDIAVEWES | | | | | | HQGLS |
| | WGQGTT | NGQPENNYKTTPPV | | | | | | SPVTK |
| | VTVSS | LDSDGSFFLYSKLT | | | | | | SFNRG |
| | (SEQ | VDKSRWQQGNVFSC | | | | | | EC |
| | ID NO: | SVMHEALHNHYTQK | | | | | | (SEQ |
| | 1672) | SLSLSPG (SEQ | | | | | | ID |
| | | ID NO: 44) | | | | | | NO: |
| | | | | | | | | 45) |
| PMAB220 | QVQLVQ | ASTKGPSVFPLAPS | GGGGSG | EVQLLESG | GGGGSG | DIQMTQS | DIQMTQS | RTVAA |
| | SGAEVK | SKSTSGGTAALGCL | GGGSGG | GGLVQPGG | GGGSGG | PSSLSAS | PSSLSAS | PSVFI |
| | KPGASV | VKDYFPEPVTVSWN | GGS | SLRLSCAA | GGSGGG | VGDRVTI | VGDRVTI | FPPSD |
| | KVSCKA | SGALTSGVHTFPAV | (SEQ | SGFTFSDE | GS | TCRASQS | TCRASQS | EQLKS |
| | SGYTFT | LQSSGLYSLSSVVT | ID NO: | WMHWVRQA | (SEQ | VSRSLAW | ISNWVAW | GTASV |
| | DHYMHW | VPSSSLGTQTYICN | 30) | PGKGLEWI | ID NO: | YQQKPGK | YQQKPGK | VCLLN |
| | VRQAPG | VNHKPSNTKVDKKV | | SYISGDSG | 22) | APKLLIY | APKLLIY | NFYPR |
| | QGLEWM | EPKSCDKTHTCPPC | | YTNYADSV | | AASSLQS | RASTLQS | EAKVQ |
| | GTIAPS | PAPEAAGAPSVELE | | KGRFTISR | | GVPSRFS | GVPSRFS | WKVDN |
| | GGSTSY | PPKPKDTLMISRTP | | DNSKNTLY | | GSGSGTD | GSGSGTD | ALQSG |
| | AQKFQG | EVTCVVVDVSHEDP | | LQMNSLRA | | FTLTISS | FTLTISS | NSQES |
| | RVTMTR | EVKFNWYVDGVEVH | | EDTAVYYC | | LQPEDFA | LQPEDFA | VTEQD |
| | DTSTST | NAKTKPREEQYNST | | ARDRPYYY | | TYYCQQY | TYYCQQS | SKDST |
| | VYMELS | YRVVSVLTVLHQDW | | YMDVWGKG | | KSYPVTF | HSLPLTF | YSLSS |
| | SLRSED | LNGKEYKCKVSNKA | | TTVTVSS | | GQGTKVE | GPGTKVD | TLTLS |
| | TAVYYC | LPAPIEKTISKAKG | | (SEQ ID | | IK (SEQ | IK (SEQ | KADYE |
| | AADNGH | QPREPQVYTLPPSR | | NO: 591) | | ID NO: | ID NO: | KHKVY |
| | ASGWLY | EEMTKNQVSLTCLV | | | | 592) | 1655) | ACEVT |
| | YYGMDV | KGFYPSDIAVEWES | | | | | | HQGLS |
| | WGQGTT | NGQPENNYKTTPPV | | | | | | SPVTK |
| | VTVSS | LDSDGSFFLYSKLT | | | | | | SFNRG |
| | (SEQ | VDKSRWQQGNVFSC | | | | | | EC |
| | ID NO: | SVMHEALHNHYTQK | | | | | | (SEQ |
| | 1673) | SLSLSPG (SEQ | | | | | | ID |
| | | ID NO: 44) | | | | | | NO: |
| | | | | | | | | 45) |
| PMAB221 | QVQLVQ | ASTKGPSVFPLAPS | GGGGSG | EVQLLESG | GGGGSG | DIQMTQS | DIQMTQS | RTVAA |
| | SGAEVK | SKSTSGGTAALGCL | GGGSGG | GGLVQPGG | GGGSGG | PSSLSAS | PSSLSAS | PSVFI |
| | KPGASV | VKDYFPEPVTVSWN | GGS | SLRLSCAA | GGSGGG | VGDRVTI | VGDRVTI | FPPSD |
| | KVSCKA | SGALTSGVHTFPAV | (SEQ | SGFTFSDE | GS | TCRASQS | TCRASQS | EQLKS |
| | SGYTFT | LQSSGLYSLSSVVT | ID NO: | WMHWVRQA | (SEQ | VSRSLAW | ISNWVAW | GTASV |
| | SYYMHW | VPSSSLGTQTYICN | 30) | PGKGLEWI | ID NO: | YQQKPGK | YQQKPGK | VCLLN |
| | VRQAPG | VNHKPSNTKVDKKV | | SYISGDSG | 22) | APKLLIY | APKLLIY | NFYPR |
| | QGLEWM | EPKSCDKTHTCPPC | | YTNYADSV | | AASSLQS | RASTLQS | EAKVQ |
| | GTIAPS | PAPEAAGAPSVELE | | KGRFTISR | | GVPSRFS | GVPSRFS | WKVDN |
| | GGRTSY | PPKPKDTLMISRTP | | DNSKNTLY | | GSGSGTD | GSGSGTD | ALQSG |
| | AQKFQG | EVTCVVVDVSHEDP | | LQMNSLRA | | FTLTISS | FTLTISS | NSQES |
| | RVTMTR | EVKFNWYVDGVEVH | | EDTAVYYC | | LQPEDFA | LQPEDFA | VTEQD |
| | DTSTST | NAKTKPREEQYNST | | ARDRPYYY | | TYYCQQY | TYYCQQS | SKDST |
| | VYMELS | YRVVSVLTVLHQDW | | YMDVWGKG | | KSYPVTF | HSLPLTF | YSLSS |
| | SLRSED | LNGKEYKCKVSNKA | | TTVTVSS | | GQGTKVE | GPGTKVD | TLTLS |
| | TAVYYC | LPAPIEKTISKAKG | | (SEQ ID | | IK (SEQ | IK (SEQ | KADYE |
| | AADNGH | QPREPQVYTLPPSR | | NO: 591) | | ID NO: | ID NO: | KHKVY |
| | ASGWLY | EEMTKNQVSLTCLV | | | | 592) | 1655) | ACEVT |
| | YYGMDV | KGFYPSDIAVEWES | | | | | | HQGLS |
| | WGQGTT | NGQPENNYKTTPPV | | | | | | SPVTK |
| | VTVSS | LDSDGSFFLYSKLT | | | | | | SFNRG |
| | (SEQ | VDKSRWQQGNVFSC | | | | | | EC |
| | ID NO: | SVMHEALHNHYTQK | | | | | | (SEQ |
| | 1674) | SLSLSPG (SEQ | | | | | | ID |
| | | ID NO: 44) | | | | | | NO: |
| | | | | | | | | 45) |
| PMAB222 | QVQLVQ | ASTKGPSVFPLAPS | GGGGSG | EVQLLESG | GGGGSG | DIQMTQS | DIQMTQS | RTVAA |
| | SGAEVK | SKSTSGGTAALGCL | GGGSGG | GGLVQPGG | GGGSGG | PSSLSAS | PSSLSAS | PSVFI |
| | KPGASV | VKDYFPEPVTVSWN | GGS | SLRLSCAA | GGSGGG | VGDRVTI | VGDRVTI | FPPSD |
| | KVSCKA | SGALTSGVHTFPAV | (SEQ | SGFTFSDE | GS | TCRASQS | TCRASQS | EQLKS |
| | SGYTFT | LQSSGLYSLSSVVT | ID NO: | WMHWVRQA | (SEQ | VSRSLAW | ISNWVAW | GTASV |
| | SYYMHW | VPSSSLGTQTYICN | 30) | PGKGLEWI | ID NO: | YQQKPGK | YQQKPGK | VCLLN |
| | VRQAPG | VNHKPSNTKVDKKV | | SYISGDSG | 22) | APKLLIY | APKLLIY | NFYPR |
| | QGLEWM | EPKSCDKTHTCPPC | | YTNYADSV | | AASSLQS | RASTLQS | EAKVQ |
| | GTIAPS | PAPEAAGAPSVELE | | KGRFTISR | | GVPSRFS | GVPSRFS | WKVDN |
| | GGSTSY | PPKPKDTLMISRTP | | DNSKNTLY | | GSGSGTD | GSGSGTD | ALQSG |
| | AQKFQG | EVTCVVVDVSHEDP | | LQMNSLRA | | FTLTISS | FTLTISS | NSQES |
| | RVTMTR | EVKFNWYVDGVEVH | | EDTAVYYC | | LQPEDFA | LQPEDFA | VTEQD |
| | DTSTST | NAKTKPREEQYNST | | ARDRPYYY | | TYYCQQY | TYYCQQS | SKDST |
| | VYMELS | YRVVSVLTVLHQDW | | YMDVWGKG | | KSYPVTF | HSLPLTF | YSLSS |
| | SLRSED | LNGKEYKCKVSNKA | | TTVTVSS | | GQGTKVE | GPGTKVD | TLTLS |
| | TAVYYC | LPAPIEKTISKAKG | | (SEQ ID | | IK (SEQ | IK (SEQ | KADYE |
| | AADNGH | QPREPQVYTLPPSR | | NO: 591) | | ID NO: | ID NO: | KHKVY |
| | ASGWLY | EEMTKNQVSLTCLV | | | | 592) | 1655) | ACEVT |
| | YYGMDV | KGFYPSDIAVEWES | | | | | | HQGLS |
| | WGQGTT | NGQPENNYKTTPPV | | | | | | SPVTK |
| | VTVSS | LDSDGSFFLYSKLT | | | | | | SFNRG |
| | (SEQ | VDKSRWQQGNVFSC | | | | | | EC |
| | ID NO: | SVMHEALHNHYTQK | | | | | | (SEQ |
| | 1675) | SLSLSPG (SEQ | | | | | | ID |
| | | ID NO: 44) | | | | | | NO: |
| | | | | | | | | 45) |
| PMAB223 | QVQLVQ | ASTKGPSVFPLAPS | GGGGSG | EVQLLESG | GGGGSG | DIQMTQS | DIQMTQS | RTVAA |
| | SGAEVK | SKSTSGGTAALGCL | GGGSGG | GGLVQPGG | GGGSGG | PSSLSAS | PSSLSAS | PSVFI |
| | KPGASV | VKDYFPEPVTVSWN | GGS | SLRLSCAA | GGSGGG | VGDRVTI | VGDRVTI | FPPSD |
| | KVSCKA | SGALTSGVHTFPAV | (SEQ | SGFTFSDE | GS | TCRASQS | TCRASQS | EQLKS |
| | SGYTES | LQSSGLYSLSSVVT | ID NO: | WMHWVRQA | (SEQ | VSRSLAW | ISSYVAW | GTASV |
| | DHYMHW | VPSSSLGTQTYICN | 30) | PGKGLEWI | ID NO: | YQQKPGK | YQQKPGK | VCLLN |
| | VRQAPG | VNHKPSNTKVDKKV | | SYISGDSG | 22) | APKLLIY | APKLLIY | NFYPR |
| | QGLEWM | EPKSCDKTHTCPPC | | YTNYADSV | | AASSLQS | RASTLQS | EAKVQ |
| | GTIAPS | PAPEAAGAPSVELE | | KGRFTISR | | GVPSRFS | GVPSRFS | WKVDN |
| | GGRTSY | PPKPKDTLMISRTP | | DNSKNTLY | | GSGSGTD | GSGSGTD | ALQSG |
| | AQKFQG | EVTCVVVDVSHEDP | | LQMNSLRA | | FTLTISS | FTLTISS | NSQES |
| | RVTMTR | EVKFNWYVDGVEVH | | EDTAVYYC | | LQPEDFA | LQPEDFA | VTEQD |
| | DTSTST | NAKTKPREEQYNST | | ARDRPYYY | | TYYCQQY | TYYCQQS | SKDST |
| | VYMELS | YRVVSVLTVLHQDW | | YMDVWGKG | | KSYPVTF | HSLPLTF | YSLSS |
| | SLRSED | LNGKEYKCKVSNKA | | TTVTVSS | | GQGTKVE | GPGTKVD | TLTLS |
| | TAVYYC | LPAPIEKTISKAKG | | (SEQ ID | | IK (SEQ | IK (SEQ | KADYE |
| | AADNGH | QPREPQVYTLPPSR | | NO: 591) | | ID NO: | ID NO: | KHKVY |
| | ASGWLY | EEMTKNQVSLTCLV | | | | 592) | 1676) | ACEVT |
| | YYGMDV | KGFYPSDIAVEWES | | | | | | HQGLS |
| | WGQGTT | NGQPENNYKTTPPV | | | | | | SPVTK |
| | VTVSS | LDSDGSFFLYSKLT | | | | | | SFNRG |
| | (SEQ | VDKSRWQQGNVFSC | | | | | | EC |
| | ID NO: | SVMHEALHNHYTQK | | | | | | (SEQ |
| | 1661) | SLSLSPG (SEQ | | | | | | ID |
| | | ID NO: 44) | | | | | | NO: |
| | | | | | | | | 45) |
| PMAB224 | QVQLVQ | ASTKGPSVFPLAPS | GGGGSG | EVQLLESG | GGGGSG | DIQMTQS | DIQMTQS | RTVAA |
| | SGAEVK | SKSTSGGTAALGCL | GGGSGG | GGLVQPGG | GGGSGG | PSSLSAS | PSSLSAS | PSVFI |
| | KPGASV | VKDYFPEPVTVSWN | GGS | SLRLSCAA | GGSGGG | VGDRVTI | VGDRVTI | FPPSD |
| | KVSCKA | SGALTSGVHTFPAV | (SEQ | SGFTFSDE | GS | TCRASQS | TCRASQS | EQLKS |
| | SGYTES | LQSSGLYSLSSVVT | ID NO: | WMHWVRQA | (SEQ | VSRSLAW | ISSWLAW | GTASV |
| | DHYMHW | VPSSSLGTQTYICN | 30) | PGKGLEWI | ID NO: | YQQKPGK | YQQKPGK | VCLLN |
| | VRQAPG | VNHKPSNTKVDKKV | | SYISGDSG | 22) | APKLLIY | APKLLIY | NFYPR |
| | QGLEWM | EPKSCDKTHTCPPC | | YTNYADSV | | AASSLQS | RASTLQS | EAKVQ |
| | GTIAPS | PAPEAAGAPSVELE | | KGRFTISR | | GVPSRFS | GVPSRFS | WKVDN |
| | GGRTSY | PPKPKDTLMISRTP | | DNSKNTLY | | GSGSGTD | GSGSGTD | ALQSG |
| | AQKFQG | EVTCVVVDVSHEDP | | LQMNSLRA | | FTLTISS | FTLTISS | NSQES |
| | RVTMTR | EVKFNWYVDGVEVH | | EDTAVYYC | | LQPEDFA | LQPEDFA | VTEQD |
| | DTSTST | NAKTKPREEQYNST | | ARDRPYYY | | TYYCQQY | TYYCQQS | SKDST |
| | VYMELS | YRVVSVLTVLHQDW | | YMDVWGKG | | KSYPVTF | HSLPLTF | YSLSS |
| | SLRSED | LNGKEYKCKVSNKA | | TTVTVSS | | GQGTKVE | GPGTKVD | TLTLS |
| | TAVYYC | LPAPIEKTISKAKG | | (SEQ ID | | IK (SEQ | IK (SEQ | KADYE |
| | AADNGH | QPREPQVYTLPPSR | | NO: 591) | | ID NO: | ID NO: | KHKVY |
| | ASGWLY | EEMTKNQVSLTCLV | | | | 592) | 1677) | ACEVT |
| | YYGMDV | KGFYPSDIAVEWES | | | | | | HQGLS |
| | WGQGTT | NGQPENNYKTTPPV | | | | | | SPVTK |
| | VTVSS | LDSDGSFFLYSKLT | | | | | | SFNRG |
| | (SEQ | VDKSRWQQGNVFSC | | | | | | EC |
| | ID NO: | SVMHEALHNHYTQK | | | | | | (SEQ |
| | 1661) | SLSLSPG (SEQ | | | | | | ID |
| | | ID NO: 44) | | | | | | NO: |
| | | | | | | | | 45) |
| PMAB225 | QVQLVQ | ASTKGPSVFPLAPS | GGGGSG | EVQLLESG | GGGGSG | DIQMTQS | DIQMTQS | RTVAA |
| | SGAEVK | SKSTSGGTAALGCL | GGGSGG | GGLVQPGG | GGGSGG | PSSLSAS | PSSLSAS | PSVFI |
| | KPGASV | VKDYFPEPVTVSWN | GGS | SLRLSCAA | GGSGGG | VGDRVTI | VGDRVTI | FPPSD |
| | KVSCKA | SGALTSGVHTFPAV | (SEQ | SGFTFSDE | GS | TCRASQS | TCRASQS | EQLKS |
| | SGYTES | LQSSGLYSLSSVVT | ID NO: | WMHWVRQA | (SEQ | VSRSLAW | ISSYLAW | GTASV |
| | DHYMHW | VPSSSLGTQTYICN | 30) | PGKGLEWI | ID NO: | YQQKPGK | YQQKPGK | VCLLN |
| | VRQAPG | VNHKPSNTKVDKKV | | SYISGDSG | 22) | APKLLIY | APKLLIY | NFYPR |
| | QGLEWM | EPKSCDKTHTCPPC | | YTNYADSV | | AASSLQS | RASTLQS | EAKVQ |
| | GTIAPS | PAPEAAGAPSVELE | | KGRFTISR | | GVPSRFS | GVPSRFS | WKVDN |
| | GGRTSY | PPKPKDTLMISRTP | | DNSKNTLY | | GSGSGTD | GSGSGTD | ALQSG |
| | AQKFQG | EVTCVVVDVSHEDP | | LQMNSLRA | | FTLTISS | FTLTISS | NSQES |
| | RVTMTR | EVKFNWYVDGVEVH | | EDTAVYYC | | LQPEDFA | LQPEDFA | VTEQD |
| | DTSTST | NAKTKPREEQYNST | | ARDRPYYY | | TYYCQQY | TYYCQQS | SKDST |
| | VYMELS | YRVVSVLTVLHQDW | | YMDVWGKG | | KSYPVTF | HSLPLTF | YSLSS |
| | SLRSED | LNGKEYKCKVSNKA | | TTVTVSS | | GQGTKVE | GPGTKVD | TLTLS |
| | TAVYYC | LPAPIEKTISKAKG | | (SEQ ID | | IK (SEQ | IK (SEQ | KADYE |
| | AADNGH | QPREPQVYTLPPSR | | NO: 591) | | ID NO: | ID NO: | KHKVY |
| | ASGWLY | EEMTKNQVSLTCLV | | | | 592) | 1678) | ACEVT |
| | YYGMDV | KGFYPSDIAVEWES | | | | | | HQGLS |
| | WGQGTT | NGQPENNYKTTPPV | | | | | | SPVTK |
| | VTVSS | LDSDGSFFLYSKLT | | | | | | SFNRG |
| | (SEQ | VDKSRWQQGNVFSC | | | | | | EC |
| | ID NO: | SVMHEALHNHYTQK | | | | | | (SEQ |
| | 1661) | SLSLSPG (SEQ | | | | | | ID |
| | | ID NO: 44) | | | | | | NO: |
| | | | | | | | | 45) |
| PMAB226 | QVQLVQ | ASTKGPSVFPLAPS | GGGGSG | EVQLLESG | GGGGSG | DIQMTQS | DIQMTQS | RTVAA |
| | SGAEVK | SKSTSGGTAALGCL | GGGSGG | GGLVQPGG | GGGSGG | PSSLSAS | PSSLSAS | PSVFI |
| | KPGASV | VKDYFPEPVTVSWN | GGS | SLRLSCAA | GGSGGG | VGDRVTI | VGDRVTI | FPPSD |
| | KVSCKA | SGALTSGVHTFPAV | (SEQ | SGFTFSDE | GS | TCRASQS | TCRASQS | EQLKS |
| | SGYTFT | LQSSGLYSLSSVVT | ID NO: | WMHWVRQA | (SEQ | VSRSLAW | ISSYVAW | GTASV |
| | SYYMHW | VPSSSLGTQTYICN | 30) | PGKGLEWI | ID NO: | YQQKPGK | YQQKPGK | VCLLN |
| | VRQAPG | VNHKPSNTKVDKKV | | SYISGDSG | 22) | APKLLIY | APKLLIY | NFYPR |
| | QGLEWM | EPKSCDKTHTCPPC | | YTNYADSV | | AASSLQS | RASTLQS | EAKVQ |
| | GTIAPS | PAPEAAGAPSVELE | | KGRFTISR | | GVPSRFS | GVPSRFS | WKVDN |
| | GGRTSY | PPKPKDTLMISRTP | | DNSKNTLY | | GSGSGTD | GSGSGTD | ALQSG |
| | AQKFQG | EVTCVVVDVSHEDP | | LQMNSLRA | | FTLTISS | FTLTISS | NSQES |
| | RVTMTR | EVKFNWYVDGVEVH | | EDTAVYYC | | LQPEDFA | LQPEDFA | VTEQD |
| | DTSTST | NAKTKPREEQYNST | | ARDRPYYY | | TYYCQQY | TYYCQQS | SKDST |
| | VYMELS | YRVVSVLTVLHQDW | | YMDVWGKG | | KSYPVTF | HSLPLTF | YSLSS |
| | SLRSED | LNGKEYKCKVSNKA | | TTVTVSS | | GQGTKVE | GPGTKVD | TLTLS |
| | TAVYYC | LPAPIEKTISKAKG | | (SEQ ID | | IK (SEQ | IK (SEQ | KADYE |
| | AADNGH | QPREPQVYTLPPSR | | NO: 591) | | ID NO: | ID NO: | KHKVY |
| | ASGWLY | EEMTKNQVSLTCLV | | | | 592) | 1676) | ACEVT |
| | YYGMDV | KGFYPSDIAVEWES | | | | | | HQGLS |
| | WGQGTT | NGQPENNYKTTPPV | | | | | | SPVTK |
| | VTVSS | LDSDGSFFLYSKLT | | | | | | SFNRG |
| | (SEQ | VDKSRWQQGNVFSC | | | | | | EC |
| | ID NO: | SVMHEALHNHYTQK | | | | | | (SEQ |
| | 1674) | SLSLSPG (SEQ | | | | | | ID |
| | | ID NO: 44) | | | | | | NO: |
| | | | | | | | | 45) |
| PMAB227 | QVQLVQ | ASTKGPSVFPLAPS | GGGGSG | EVQLLESG | GGGGSG | DIQMTQS | DIQMTQS | RTVAA |
| | SGAEVK | SKSTSGGTAALGCL | GGGSGG | GGLVQPGG | GGGSGG | PSSLSAS | PSSLSAS | PSVFI |
| | KPGASV | VKDYFPEPVTVSWN | GGS | SLRLSCAA | GGSGGG | VGDRVTI | VGDRVTI | FPPSD |
| | KVSCKA | SGALTSGVHTFPAV | (SEQ | SGFTFSDE | GS | TCRASQS | TCRASQS | EQLKS |
| | SGYTFT | LQSSGLYSLSSVVT | ID NO: | WMHWVRQA | (SEQ | VSRSLAW | ISSWLAW | GTASV |
| | SYYMHW | VPSSSLGTQTYICN | 30) | PGKGLEWI | ID NO: | YQQKPGK | YQQKPGK | VCLLN |
| | VRQAPG | VNHKPSNTKVDKKV | | SYISGDSG | 22) | APKLLIY | APKLLIY | NFYPR |
| | QGLEWM | EPKSCDKTHTCPPC | | YTNYADSV | | AASSLQS | RASTLQS | EAKVQ |
| | GTIAPS | PAPEAAGAPSVELE | | KGRFTISR | | GVPSRFS | GVPSRFS | WKVDN |
| | GGRTSY | PPKPKDTLMISRTP | | DNSKNTLY | | GSGSGTD | GSGSGTD | ALQSG |
| | AQKFQG | EVTCVVVDVSHEDP | | LQMNSLRA | | FTLTISS | FTLTISS | NSQES |
| | RVTMTR | EVKFNWYVDGVEVH | | EDTAVYYC | | LQPEDFA | LQPEDFA | VTEQD |
| | DTSTST | NAKTKPREEQYNST | | ARDRPYYY | | TYYCQQY | TYYCQQS | SKDST |
| | VYMELS | YRVVSVLTVLHQDW | | YMDVWGKG | | KSYPVTF | HSLPLTF | YSLSS |
| | SLRSED | LNGKEYKCKVSNKA | | TTVTVSS | | GQGTKVE | GPGTKVD | TLTLS |
| | TAVYYC | LPAPIEKTISKAKG | | (SEQ ID | | IK (SEQ | IK (SEQ | KADYE |
| | AADNGH | QPREPQVYTLPPSR | | NO: 591) | | ID NO: | ID NO: | KHKVY |
| | ASGWLY | EEMTKNQVSLTCLV | | | | 592) | 1677) | ACEVT |
| | YYGMDV | KGFYPSDIAVEWES | | | | | | HQGLS |
| | WGQGTT | NGQPENNYKTTPPV | | | | | | SPVTK |
| | VTVSS | LDSDGSFFLYSKLT | | | | | | SFNRG |
| | (SEQ | VDKSRWQQGNVFSC | | | | | | EC |
| | ID NO: | SVMHEALHNHYTQK | | | | | | (SEQ |
| | 1674) | SLSLSPG (SEQ | | | | | | ID |
| | | ID NO: 44) | | | | | | NO: |
| | | | | | | | | 45) |
| PMAB228 | QVQLVQ | ASTKGPSVFPLAPS | GGGGSG | EVQLLESG | GGGGSG | DIQMTQS | DIQMTQS | RTVAA |
| | SGAEVK | SKSTSGGTAALGCL | GGGSGG | GGLVQPGG | GGGSGG | PSSLSAS | PSSLSAS | PSVFI |
| | KPGASV | VKDYFPEPVTVSWN | GGS | SLRLSCAA | GGSGGG | VGDRVTI | VGDRVTI | FPPSD |
| | KVSCKA | SGALTSGVHTFPAV | (SEQ | SGFTFSDE | GS | TCRASQS | TCRASQS | EQLKS |
| | SGYTFT | LQSSGLYSLSSVVT | ID NO: | WMHWVRQA | (SEQ | VSRSLAW | ISSYLAW | GTASV |
| | SYYMHW | VPSSSLGTQTYICN | 30) | PGKGLEWI | ID NO: | YQQKPGK | YQQKPGK | VCLLN |
| | VRQAPG | VNHKPSNTKVDKKV | | SYISGDSG | 22) | APKLLIY | APKLLIY | NFYPR |
| | QGLEWM | EPKSCDKTHTCPPC | | YTNYADSV | | AASSLQS | RASTLQS | EAKVQ |
| | GTIAPS | PAPEAAGAPSVELE | | KGRFTISR | | GVPSRFS | GVPSRFS | WKVDN |
| | GGRTSY | PPKPKDTLMISRTP | | DNSKNTLY | | GSGSGTD | GSGSGTD | ALQSG |
| | AQKFQG | EVTCVVVDVSHEDP | | LQMNSLRA | | FTLTISS | FTLTISS | NSQES |
| | RVTMTR | EVKFNWYVDGVEVH | | EDTAVYYC | | LQPEDFA | LQPEDFA | VTEQD |
| | DTSTST | NAKTKPREEQYNST | | ARDRPYYY | | TYYCQQY | TYYCQQS | SKDST |
| | VYMELS | YRVVSVLTVLHQDW | | YMDVWGKG | | KSYPVTF | HSLPLTF | YSLSS |
| | SLRSED | LNGKEYKCKVSNKA | | TTVTVSS | | GQGTKVE | GPGTKVD | TLTLS |
| | TAVYYC | LPAPIEKTISKAKG | | (SEQ ID | | IK (SEQ | IK (SEQ | KADYE |
| | AADNGH | QPREPQVYTLPPSR | | NO: 591) | | ID NO: | ID NO: | KHKVY |
| | ASGWLY | EEMTKNQVSLTCLV | | | | 592) | 1678) | ACEVT |
| | YYGMDV | KGFYPSDIAVEWES | | | | | | HQGLS |
| | WGQGTT | NGQPENNYKTTPPV | | | | | | SPVTK |
| | VTVSS | LDSDGSFFLYSKLT | | | | | | SFNRG |
| | (SEQ | VDKSRWQQGNVFSC | | | | | | EC |
| | ID NO: | SVMHEALHNHYTQK | | | | | | (SEQ |
| | 1674) | SLSLSPG (SEQ | | | | | | ID |
| | | ID NO: 44) | | | | | | NO: |
| | | | | | | | | 45) |
| PMAB229 | QVQLVQ | ASTKGPSVFPLAPS | GGGGSG | EVQLLESG | GGGGSG | DIQMTQS | DIQMTQS | RTVAA |
| | SGAEVK | SKSTSGGTAALGCL | GGGSGG | GGLVQPGG | GGGSGG | PSSLSAS | PSSLSAS | PSVFI |
| | KPGASV | VKDYFPEPVTVSWN | GGS | SLRLSCAA | GGSGGG | VGDRVTI | VGDRVTI | FPPSD |
| | KVSCKA | SGALTSGVHTFPAV | (SEQ | SGFTFSDE | GS | TCRASQS | TCRASQS | EQLKS |
| | SGYTFT | LQSSGLYSLSSVVT | ID NO: | WMHWVRQA | (SEQ | VSRSLAW | ISSYVAW | GTASV |
| | SYYMHW | VPSSSLGTQTYICN | 30) | PGKGLEWI | ID NO: | YQQKPGK | YQQKPGK | VCLLN |
| | VRQAPG | VNHKPSNTKVDKKV | | SYISGDSG | 22) | APKLLIY | APKLLIY | NFYPR |
| | QGLEWM | EPKSCDKTHTCPPC | | YTNYADSV | | AASSLQS | RASTLQS | EAKVQ |
| | GTIAPS | PAPEAAGAPSVELE | | KGRFTISR | | GVPSRFS | GVPSRFS | WKVDN |
| | GGSTSY | PPKPKDTLMISRTP | | DNSKNTLY | | GSGSGTD | GSGSGTD | ALQSG |
| | AQKFQG | EVTCVVVDVSHEDP | | LQMNSLRA | | FTLTISS | FTLTISS | NSQES |
| | RVTMTR | EVKFNWYVDGVEVH | | EDTAVYYC | | LQPEDFA | LQPEDFA | VTEQD |
| | DTSTST | NAKTKPREEQYNST | | ARDRPYYY | | TYYCQQY | TYYCQQS | SKDST |
| | VYMELS | YRVVSVLTVLHQDW | | YMDVWGKG | | KSYPVTF | HSLPLTF | YSLSS |
| | SLRSED | LNGKEYKCKVSNKA | | TTVTVSS | | GQGTKVE | GPGTKVD | TLTLS |
| | TAVYYC | LPAPIEKTISKAKG | | (SEQ ID | | IK (SEQ | IK (SEQ | KADYE |
| | AADNGH | QPREPQVYTLPPSR | | NO: 591) | | ID NO: | ID NO: | KHKVY |
| | ASGWLY | EEMTKNQVSLTCLV | | | | 592) | 1676) | ACEVT |
| | YYGMDV | KGFYPSDIAVEWES | | | | | | HQGLS |
| | WGQGTT | NGQPENNYKTTPPV | | | | | | SPVTK |
| | VTVSS | LDSDGSFFLYSKLT | | | | | | SFNRG |
| | (SEQ | VDKSRWQQGNVFSC | | | | | | EC |
| | ID NO: | SVMHEALHNHYTQK | | | | | | (SEQ |
| | 1675) | SLSLSPG (SEQ | | | | | | ID |
| | | ID NO: 44) | | | | | | NO: |
| | | | | | | | | 45) |
| PMAB230 | QVQLVQ | ASTKGPSVFPLAPS | GGGGSG | EVQLLESG | GGGGSG | DIQMTQS | DIQMTQS | RTVAA |
| | SGAEVK | SKSTSGGTAALGCL | GGGSGG | GGLVQPGG | GGGSGG | PSSLSAS | PSSLSAS | PSVFI |
| | KPGASV | VKDYFPEPVTVSWN | GGS | SLRLSCAA | GGSGGG | VGDRVTI | VGDRVTI | FPPSD |
| | KVSCKA | SGALTSGVHTFPAV | (SEQ | SGFTFSDE | GS | TCRASQS | TCRASQS | EQLKS |
| | SGYTFT | LQSSGLYSLSSVVT | ID NO: | WMHWVRQA | (SEQ | VSRSLAW | ISSWLAW | GTASV |
| | SYYMHW | VPSSSLGTQTYICN | 30) | PGKGLEWI | ID NO: | YQQKPGK | YQQKPGK | VCLLN |
| | VRQAPG | VNHKPSNTKVDKKV | | SYISGDSG | 22) | APKLLIY | APKLLIY | NFYPR |
| | QGLEWM | EPKSCDKTHTCPPC | | YTNYADSV | | AASSLQS | RASTLQS | EAKVQ |
| | GTIAPS | PAPEAAGAPSVELE | | KGRFTISR | | GVPSRFS | GVPSRFS | WKVDN |
| | GGSTSY | PPKPKDTLMISRTP | | DNSKNTLY | | GSGSGTD | GSGSGTD | ALQSG |
| | AQKFQG | EVTCVVVDVSHEDP | | LQMNSLRA | | FTLTISS | FTLTISS | NSQES |
| | RVTMTR | EVKFNWYVDGVEVH | | EDTAVYYC | | LQPEDFA | LQPEDFA | VTEQD |
| | DTSTST | NAKTKPREEQYNST | | ARDRPYYY | | TYYCQQY | TYYCQQS | SKDST |
| | VYMELS | YRVVSVLTVLHQDW | | YMDVWGKG | | KSYPVTF | HSLPLTF | YSLSS |
| | SLRSED | LNGKEYKCKVSNKA | | TTVTVSS | | GQGTKVE | GPGTKVD | TLTLS |
| | TAVYYC | LPAPIEKTISKAKG | | (SEQ ID | | IK (SEQ | IK (SEQ | KADYE |
| | AADNGH | QPREPQVYTLPPSR | | NO: 591) | | ID NO: | ID NO: | KHKVY |
| | ASGWLY | EEMTKNQVSLTCLV | | | | 592) | 1677) | ACEVT |
| | YYGMDV | KGFYPSDIAVEWES | | | | | | HQGLS |
| | WGQGTT | NGQPENNYKTTPPV | | | | | | SPVTK |
| | VTVSS | LDSDGSFFLYSKLT | | | | | | SFNRG |
| | (SEQ | VDKSRWQQGNVFSC | | | | | | EC |
| | ID NO: | SVMHEALHNHYTQK | | | | | | (SEQ |
| | 1675) | SLSLSPG (SEQ | | | | | | ID |
| | | ID NO: 44) | | | | | | NO: |
| | | | | | | | | 45) |
| PMAB231 | QVQLVQ | ASTKGPSVFPLAPS | GGGGSG | EVQLLESG | GGGGSG | DIQMTQS | DIQMTQS | RTVAA |
| | SGAEVK | SKSTSGGTAALGCL | GGGSGG | GGLVQPGG | GGGSGG | PSSLSAS | PSSLSAS | PSVFI |
| | KPGASV | VKDYFPEPVTVSWN | GGS | SLRLSCAA | GGSGGG | VGDRVTI | VGDRVTI | FPPSD |
| | KVSCKA | SGALTSGVHTFPAV | (SEQ | SGFTFSDE | GS | TCRASQS | TCRASQS | EQLKS |
| | SGYTFT | LQSSGLYSLSSVVT | ID NO: | WMHWVRQA | (SEQ | VSRSLAW | ISSYLAW | GTASV |
| | SYYMHW | VPSSSLGTQTYICN | 30) | PGKGLEWI | ID NO: | YQQKPGK | YQQKPGK | VCLLN |
| | VRQAPG | VNHKPSNTKVDKKV | | SYISGDSG | 22) | APKLLIY | APKLLIY | NFYPR |
| | QGLEWM | EPKSCDKTHTCPPC | | YTNYADSV | | AASSLQS | RASTLQS | EAKVQ |
| | GTIAPS | PAPEAAGAPSVELE | | KGRFTISR | | GVPSRFS | GVPSRFS | WKVDN |
| | GGSTSY | PPKPKDTLMISRTP | | DNSKNTLY | | GSGSGTD | GSGSGTD | ALQSG |
| | AQKFQG | EVTCVVVDVSHEDP | | LQMNSLRA | | FTLTISS | FTLTISS | NSQES |
| | RVTMTR | EVKFNWYVDGVEVH | | EDTAVYYC | | LQPEDFA | LQPEDFA | VTEQD |
| | DTSTST | NAKTKPREEQYNST | | ARDRPYYY | | TYYCQQY | TYYCQQS | SKDST |
| | VYMELS | YRVVSVLTVLHQDW | | YMDVWGKG | | KSYPVTF | HSLPLTF | YSLSS |
| | SLRSED | LNGKEYKCKVSNKA | | TTVTVSS | | GQGTKVE | GPGTKVD | TLTLS |
| | TAVYYC | LPAPIEKTISKAKG | | (SEQ ID | | IK (SEQ | IK (SEQ | KADYE |
| | AADNGH | QPREPQVYTLPPSR | | NO: 591) | | ID NO: | ID NO: | KHKVY |
| | ASGWLY | EEMTKNQVSLTCLV | | | | 592) | 1678) | ACEVT |
| | YYGMDV | KGFYPSDIAVEWES | | | | | | HQGLS |
| | WGQGTT | NGQPENNYKTTPPV | | | | | | SPVTK |
| | VTVSS | LDSDGSFFLYSKLT | | | | | | SFNRG |
| | (SEQ | VDKSRWQQGNVFSC | | | | | | EC |
| | ID NO: | SVMHEALHNHYTQK | | | | | | (SEQ |
| | 1675) | SLSLSPG (SEQ | | | | | | ID |
| | | ID NO: 44) | | | | | | NO: |
| | | | | | | | | 45) |

[0409] In some embodiments, the therapeutic comprises one or more sequences, or a combination thereof, selected from the Table 12.

[0410] In some embodiments, the PD-1 antibody comprises one or more amino acid sequence as provided for in the following table:

TABLE 16

| Clone | Fab VH Seq | CH1-CH3 Seq | Fab VK Seq | CK Seq |
|---|---|---|---|---|
| PMAb6 | EVQLLESGGGLV | ASTKGPSVFPLAPSSKSTSGGTAALGCLVKDYFP | DIVMTQSPDS | RTVAAPSVFIF |
| 5 | QPGGSLRLSCAA | EPVTVSWNSGALTSGVHTFPAVLQSSGLYSLSSV | LAVSLGERAT | PPSDEQLKSGT |
| | SGFTFSSYDMSW | VTVPSSSLGTQTYICNVNHKPSNTKVDKKVEPKS | INCKSSQSVL | ASVVCLLNNFY |
| | VRQAPGKGLEWV | CDKTHTCPPCPAPEAAGAPSVELFPPKPKDTLMI | YSPNNKNYLA | PREAKVQWKVD |
| | SGITISGGSTYY | SRTPEVTCVVVDVSHEDPEVKENWYVDGVEVHNA | WYQQKPGQPP | NALQSGNSQES |
| | ADSVKGRFTISR | KTKPREEQYNSTYRVVSVLTVLHQDWLNGKEYKC | KLLIYWASTR | VTEQDSKDSTY |
| | DNSKNTLYLQMN | KVSNKALPAPIEKTISKAKGQPREPQVYTLPPSR | ESGVPDRESG | SLSSTLTLSKA |
| | SLRAEDTAVYYC | EEMTKNQVSLTCLVKGFYPSDIAVEWESNGQPEN | SGSGTDETLT | DYEKHKVYACE |
| | ARGRGGSGWLDY | NYKTTPPVLDSDGSFFLYSKLTVDKSRWQQGNVE | ISSLQAEDVA | VTHQGLSSPVT |
| | WGQGTTVTVSS | SCSVMHEALHNHYTQKSLSLSPG (SEQ ID | VYYCQQYYTT | KSENRGEC |
| | (SEQ ID NO: | NO: 44) | PPTFGQGTRL | (SEQ ID NO: |
| | 1476) | | EIK (SEQ | 45) |
| | | | ID NO: | |
| | | | 1359) | |
| PMAB2 | QVQLVQSGAEVK | ASTKGPSVFPLAPSSKSTSGGTAALGCLVKDYFP | DIQMTQSPSS | RTVAAPSVFIF |
| 32 | KPGASVKVSCKA | EPVTVSWNSGALTSGVHTFPAVLQSSGLYSLSSV | LSASVGDRVT | PPSDEQLKSGT |
| | SGYTFTTYYMHW | VTVPSSSLGTQTYICNVNHKPSNTKVDKKVEPKS | ITCRASQSIS | ASVVCLLNNFY |
| | VRQAPGQGLEWM | CDKTHTCPPCPAPEAAGAPSVELFPPKPKDTLMI | NYLAWYQQKP | PREAKVQWKVD |
| | GIIQPSGGSTSY | SRTPEVTCVVVDVSHEDPEVKENWYVDGVEVHNA | GKAPKLLIYA | NALQSGNSQES |
| | AQKFQGRVTMTR | KTKPREEQYNSTYRVVSVLTVLHQDWLNGKEYKC | ASSLQSGVPS | VTEQDSKDSTY |
| | DTSTSTVYMELS | KVSNKALPAPIEKTISKAKGQPREPQVYTLPPSR | RFSGSGSGTD | SLSSTLTLSKA |
| | SLRSEDTAVYYC | EEMTKNQVSLTCLVKGFYPSDIAVEWESNGQPEN | FTLTISSLQP | DYEKHKVYACE |
| | ASGWVYWGQGTL | NYKTTPPVLDSDGSFFLYSKLTVDKSRWQQGNVE | EDFATYYCQQ | VTHQGLSSPVT |
| | VTVSS (SEQ | SCSVMHEALHNHYTQKSLSLSPG (SEQ ID | SYSTPPTFGP | KSENRGEC |
| | ID NO: 1679) | NO: 44) | GTKVDIK | (SEQ ID NO: |
| | | | (SEQ ID | 45) |
| | | | NO: 1680) | |
| PMAB2 | QVQLVQSGAEVK | ASTKGPSVFPLAPSSKSTSGGTAALGCLVKDYFP | DIQMTQSPSS | RTVAAPSVFIF |
| 33 | KPGASVKVSCKA | EPVTVSWNSGALTSGVHTFPAVLQSSGLYSLSSV | LSASVGDRVT | PPSDEQLKSGT |
| | SGYTFTTYYMHW | VTVPSSSLGTQTYICNVNHKPSNTKVDKKVEPKS | ITCRASQSIK | ASVVCLLNNFY |
| | VRQAPGQGLEWM | CDKTHTCPPCPAPEAAGAPSVFLFPPKPKDTLMI | SYLAWYQQKP | PREAKVQWKVD |
| | GIIQPSGGSTSY | SRTPEVTCVVVDVSHEDPEVKENWYVDGVEVHNA | GKAPKLLIYA | NALQSGNSQES |
| | AQKFQGRVTMTR | KTKPREEQYNSTYRVVSVLTVLHQDWLNGKEYKC | ASSLQSGVPS | VTEQDSKDSTY |
| | DTSTSTVYMELS | KVSNKALPAPIEKTISKAKGQPREPQVYTLPPSR | RFSGSGSGTD | SLSSTLTLSKA |
| | SLRSEDTAVYYC | EEMTKNQVSLTCLVKGFYPSDIAVEWESNGQPEN | FTLTISSLQP | DYEKHKVYACE |
| | ASGWVYWGQGTL | NYKTTPPVLDSDGSFFLYSKLTVDKSRWQQGNVE | EDFATYYCQQ | VTHQGLSSPVT |
| | VTVSS (SEQ | SCSVMHEALHNHYTQKSLSLSPG (SEQ ID | SYSTPPTFGP | KSENRGEC |
| | ID NO: 1679) | NO: 44) | GTKVDIK | (SEQ ID NO: |
| | | | (SEQ ID | 45) |
| | | | NO: 1681) | |
| PMAB2 | QVQLVQSGAEVK | ASTKGPSVFPLAPSSKSTSGGTAALGCLVKDYFP | DIQMTQSPSS | RTVAAPSVEIF |
| 34 | KPGASVKVSCKA | EPVTVSWNSGALTSGVHTFPAVLQSSGLYSLSSV | LSASVGDRVT | PPSDEQLKSGT |
| | SGYTFTTYYMHW | VTVPSSSLGTQTYICNVNHKPSNTKVDKKVEPKS | ITCRASQDIS | ASVVCLLNNFY |
| | VRQAPGQGLEWM | CDKTHTCPPCPAPEAAGAPSVELFPPKPKDTLMI | SYLAWYQQKP | PREAKVQWKVD |
| | GIIQPSGGSTSY | SRTPEVTCVVVDVSHEDPEVKENWYVDGVEVHNA | GKAPKLLIYA | NALQSGNSQES |
| | AQKFQGRVTMTR | KTKPREEQYNSTYRVVSVLTVLHQDWLNGKEYKC | ASSLQSGVPS | VTEQDSKDSTY |
| | DTSTSTVYMELS | KVSNKALPAPIEKTISKAKGQPREPQVYTLPPSR | RFSGSGSGTD | SLSSTLTLSKA |
| | SLRSEDTAVYYC | EEMTKNQVSLTCLVKGFYPSDIAVEWESNGQPEN | FTLTISSLQP | DYEKHKVYACE |
| | ASGWVYWGQGTL | NYKTTPPVLDSDGSFFLYSKLTVDKSRWQQGNVE | EDFATYYCQQ | VTHQGLSSPVT |
| | VTVSS (SEQ | SCSVMHEALHNHYTQKSLSLSPG (SEQ ID | SYSTPPTFGP | KSENRGEC |
| | ID NO: 1679) | NO: 44) | GTKVDIK | (SEQ ID NO: |
| | | | (SEQ ID | 45) |
| | | | NO: 1682) | |
| PMAB2 | QVQLVQSGAEVK | ASTKGPSVFPLAPSSKSTSGGTAALGCLVKDYFP | DIQMTQSPSS | RTVAAPSVFIF |
| 35 | KPGASVKVSCKA | EPVTVSWNSGALTSGVHTFPAVLQSSGLYSLSSV | LSASVGDRVT | PPSDEQLKSGT |
| | SGYTFTTYYMHW | VTVPSSSLGTQTYICNVNHKPSNTKVDKKVEPKS | ITCRASRSIS | ASVVCLLNNFY |
| | VRQAPGQGLEWM | CDKTHTCPPCPAPEAAGAPSVELFPPKPKDTLMI | SYLAWYQQKP | PREAKVQWKVD |
| | GIIQPSGGSTSY | SRTPEVTCVVVDVSHEDPEVKENWYVDGVEVHNA | GKAPKLLIYA | NALQSGNSQES |
| | AQKFQGRVTMTR | KTKPREEQYNSTYRVVSVLTVLHQDWLNGKEYKC | ASSLQSGVPS | VTEQDSKDSTY |
| | DTSTSTVYMELS | KVSNKALPAPIEKTISKAKGQPREPQVYTLPPSR | RFSGSGSGTD | SLSSTLTLSKA |
| | SLRSEDTAVYYC | EEMTKNQVSLTCLVKGFYPSDIAVEWESNGQPEN | FTLTISSLQP | DYEKHKVYACE |
| | ASGWVYWGQGTL | NYKTTPPVLDSDGSFFLYSKLTVDKSRWQQGNVF | EDFATYYCQQ | VTHQGLSSPVT |
| | VTVSS (SEQ | SCSVMHEALHNHYTQKSLSLSPG (SEQ ID | SYSTPPTFGP | KSENRGEC |
| | ID NO: 1679) | NO: 44) | GTKVDIK | (SEQ ID NO: |
| | | | (SEQ ID | 45) |
| | | | NO: 1683) | |
| PMAB2 | QVQLVQSGAEVK | ASTKGPSVFPLAPSSKSTSGGTAALGCLVKDYFP | DIQMTQSPSS | RTVAAPSVFIF |
| 36 | KPGASVKVSCKA | EPVTVSWNSGALTSGVHTFPAVLQSSGLYSLSSV | LSASVGDRVT | PPSDEQLKSGT |
| | SGYTFTTYYMHW | VTVPSSSLGTQTYICNVNHKPSNTKVDKKVEPKS | ITCQASQSIS | ASVVCLLNNFY |
| | VRQAPGQGLEWM | CDKTHTCPPCPAPEAAGAPSVELFPPKPKDTLMI | SYLAWYQQKP | PREAKVQWKVD |
| | GIIQPSGGSTSY | SRTPEVTCVVVDVSHEDPEVKENWYVDGVEVHNA | GKAPKLLIYA | NALQSGNSQES |
| | AQKFQGRVTMTR | KTKPREEQYNSTYRVVSVLTVLHQDWLNGKEYKC | ASSLQSGVPS | VTEQDSKDSTY |
| | DTSTSTVYMELS | KVSNKALPAPIEKTISKAKGQPREPQVYTLPPSR | RFSGSGSGTD | SLSSTLTLSKA |
| | SLRSEDTAVYYC | EEMTKNQVSLTCLVKGFYPSDIAVEWESNGQPEN | FTLTISSLQP | DYEKHKVYACE |
| | ASGWVYWGQGTL | NYKTTPPVLDSDGSFFLYSKLTVDKSRWQQGNVE | EDFATYYCQQ | VTHQGLSSPVT |
| | VTVSS (SEQ | SCSVMHEALHNHYTQKSLSLSPG (SEQ ID | SYSTPPTFGP | KSENRGEC |
| | ID NO: 1679) | NO: 44) | GTKVDIK | (SEQ ID NO: |
| | | | (SEQ ID | 45) |
| | | | NO: 1684) | |
| PMAB2 | QVQLVQSGAEVK | ASTKGPSVFPLAPSSKSTSGGTAALGCLVKDYFP | DIQMTQSPSS | RTVAAPSVFIF |
| 37 | KPGASVKVSCKA | EPVTVSWNSGALTSGVHTFPAVLQSSGLYSLSSV | LSASVGDRVT | PPSDEQLKSGT |
| | SGYTFTTYYMHW | VTVPSSSLGTQTYICNVNHKPSNTKVDKKVEPKS | ITCRASQSIS | ASVVCLLNNFY |
| | VRQAPGQGLEWM | CDKTHTCPPCPAPEAAGAPSVELFPPKPKDTLMI | SYLAWYQQKP | PREAKVQWKVD |
| | GIIQPSGGSTSY | SRTPEVTCVVVDVSHEDPEVKENWYVDGVEVHNA | GKAPKLLIYA | NALQSGNSQES |
| | AQKFQGRVTMTR | KTKPREEQYNSTYRVVSVLTVLHQDWLNGKEYKC | ASSLQSGVPS | VTEQDSKDSTY |
| | DTSTSTVYMELS | KVSNKALPAPIEKTISKAKGQPREPQVYTLPPSR | RFSGSGSGTD | SLSSTLTLSKA |
| | SLRSEDTAVYYC | EEMTKNQVSLTCLVKGFYPSDIAVEWESNGQPEN | FTLTISSLQP | DYEKHKVYACE |
| | ASGWVYWGQGTL | NYKTTPPVLDSDGSFFLYSKLTVDKSRWQQGNVE | EDFATYYCQQ | VTHQGLSSPVT |
| | VTVSS (SEQ | SCSVMHEALHNHYTQKSLSLSPG (SEQ ID | SYSTPPTFGP | KSENRGEC |
| | ID NO: 1679) | NO: 44) | GTKVDIK | (SEQ ID NO: |
| | | | (SEQ ID | 45) |
| | | | NO: 1479) | |
| PMAB2 | QVQLVQSGAEVK | ASTKGPSVFPLAPSSKSTSGGTAALGCLVKDYFP | DIQMTQSPSS | RTVAAPSVFIF |
| 38 | KPGASVKVSCKA | EPVTVSWNSGALTSGVHTFPAVLQSSGLYSLSSV | LSASVGDRVT | PPSDEQLKSGT |
| | SGYSFTSYYMHW | VTVPSSSLGTQTYICNVNHKPSNTKVDKKVEPKS | ITCRASQSIS | ASVVCLLNNFY |
| | VRQAPGQGLEWM | CDKTHTCPPCPAPEAAGAPSVFLFPPKPKDTLMI | NYLAWYQQKP | PREAKVQWKVD |
| | GIIQPSGGSTSY | SRTPEVTCVVVDVSHEDPEVKENWYVDGVEVHNA | GKAPKLLIYA | NALQSGNSQES |
| | AQKFQGRVTMTR | KTKPREEQYNSTYRVVSVLTVLHQDWLNGKEYKC | ASSLQSGVPS | VTEQDSKDSTY |
| | DTSTSTVYMELS | KVSNKALPAPIEKTISKAKGQPREPQVYTLPPSR | RFSGSGSGTD | SLSSTLTLSKA |
| | SLRSEDTAVYYC | EEMTKNQVSLTCLVKGFYPSDIAVEWESNGQPEN | FTLTISSLQP | DYEKHKVYACE |
| | ASGWVYWGQGTL | NYKTTPPVLDSDGSFFLYSKLTVDKSRWQQGNVE | EDFATYYCQQ | VTHQGLSSPVT |
| | VTVSS (SEQ | SCSVMHEALHNHYTQKSLSLSPG (SEQ ID | SYSTPPTFGP | KSENRGEC |
| | ID NO: 1685) | NO: 44) | GTKVDIK | (SEQ ID NO: |
| | | | (SEQ ID | 45) |
| | | | NO: 1680) | |
| PMAB2 | QVQLVQSGAEVK | ASTKGPSVFPLAPSSKSTSGGTAALGCLVKDYFP | DIQMTQSPSS | RTVAAPSVFIF |
| 39 | KPGASVKVSCKA | EPVTVSWNSGALTSGVHTFPAVLQSSGLYSLSSV | LSASVGDRVT | PPSDEQLKSGT |
| | SGYSFTSYYMHW | VTVPSSSLGTQTYICNVNHKPSNTKVDKKVEPKS | ITCRASQSIK | ASVVCLLNNFY |
| | VRQAPGQGLEWM | CDKTHTCPPCPAPEAAGAPSVFLFPPKPKDTLMI | SYLAWYQQKP | PREAKVQWKVD |
| | GIIQPSGGSTSY | SRTPEVTCVVVDVSHEDPEVKENWYVDGVEVHNA | GKAPKLLIYA | NALQSGNSQES |
| | AQKFQGRVTMTR | KTKPREEQYNSTYRVVSVLTVLHQDWLNGKEYKC | ASSLQSGVPS | VTEQDSKDSTY |
| | DTSTSTVYMELS | KVSNKALPAPIEKTISKAKGQPREPQVYTLPPSR | RFSGSGSGTD | SLSSTLTLSKA |
| | SLRSEDTAVYYC | EEMTKNQVSLTCLVKGFYPSDIAVEWESNGQPEN | FTLTISSLQP | DYEKHKVYACE |
| | ASGWVYWGQGTL | NYKTTPPVLDSDGSFFLYSKLTVDKSRWQQGNVE | EDFATYYCQQ | VTHQGLSSPVT |
| | VTVSS (SEQ | SCSVMHEALHNHYTQKSLSLSPG (SEQ ID | SYSTPPTFGP | KSENRGEC |
| | ID NO: 1685) | NO: 44) | GTKVDIK | (SEQ ID NO: |
| | | | (SEQ ID | 45) |
| | | | NO: 1681) | |
| PMAB2 | QVQLVQSGAEVK | ASTKGPSVFPLAPSSKSTSGGTAALGCLVKDYFP | DIQMTQSPSS | RTVAAPSVFIF |
| 40 | KPGASVKVSCKA | EPVTVSWNSGALTSGVHTFPAVLQSSGLYSLSSV | LSASVGDRVT | PPSDEQLKSGT |
| | SGYSFTSYYMHW | VTVPSSSLGTQTYICNVNHKPSNTKVDKKVEPKS | ITCRASQDIS | ASVVCLLNNFY |
| | VRQAPGQGLEWM | CDKTHTCPPCPAPEAAGAPSVFLFPPKPKDTLMI | SYLAWYQQKP | PREAKVQWKVD |
| | GIIQPSGGSTSY | SRTPEVTCVVVDVSHEDPEVKENWYVDGVEVHNA | GKAPKLLIYA | NALQSGNSQES |
| | AQKFQGRVTMTR | KTKPREEQYNSTYRVVSVLTVLHQDWLNGKEYKC | ASSLQSGVPS | VTEQDSKDSTY |
| | DTSTSTVYMELS | KVSNKALPAPIEKTISKAKGQPREPQVYTLPPSR | RFSGSGSGTD | SLSSTLTLSKA |
| | SLRSEDTAVYYC | EEMTKNQVSLTCLVKGFYPSDIAVEWESNGQPEN | FTLTISSLQP | DYEKHKVYACE |
| | ASGWVYWGQGTL | NYKTTPPVLDSDGSFFLYSKLTVDKSRWQQGNVE | EDFATYYCQQ | VTHQGLSSPVT |
| | VTVSS (SEQ | SCSVMHEALHNHYTQKSLSLSPG (SEQ ID | SYSTPPTFGP | KSENRGEC |
| | ID NO: 1685) | NO: 44) | GTKVDIK | (SEQ ID NO: |
| | | | (SEQ ID | 45) |
| | | | NO: 1682) | |
| PMAB2 | QVQLVQSGAEVK | ASTKGPSVFPLAPSSKSTSGGTAALGCLVKDYFP | DIQMTQSPSS | RTVAAPSVFIF |
| 41 | KPGASVKVSCKA | EPVTVSWNSGALTSGVHTFPAVLQSSGLYSLSSV | LSASVGDRVT | PPSDEQLKSGT |
| | SGYSFTSYYMHW | VTVPSSSLGTQTYICNVNHKPSNTKVDKKVEPKS | ITCRASRSIS | ASVVCLLNNFY |
| | VRQAPGQGLEWM | CDKTHTCPPCPAPEAAGAPSVFLFPPKPKDTLMI | SYLAWYQQKP | PREAKVQWKVD |
| | GIIQPSGGSTSY | SRTPEVTCVVVDVSHEDPEVKENWYVDGVEVHNA | GKAPKLLIYA | NALQSGNSQES |
| | AQKFQGRVTMTR | KTKPREEQYNSTYRVVSVLTVLHQDWLNGKEYKC | ASSLQSGVPS | VTEQDSKDSTY |
| | DTSTSTVYMELS | KVSNKALPAPIEKTISKAKGQPREPQVYTLPPSR | RFSGSGSGTD | SLSSTLTLSKA |
| | SLRSEDTAVYYC | EEMTKNQVSLTCLVKGFYPSDIAVEWESNGQPEN | FTLTISSLQP | DYEKHKVYACE |
| | ASGWVYWGQGTL | NYKTTPPVLDSDGSFFLYSKLTVDKSRWQQGNVE | EDFATYYCQQ | VTHQGLSSPVT |
| | VTVSS (SEQ | SCSVMHEALHNHYTQKSLSLSPG (SEQ ID | SYSTPPTFGP | KSENRGEC |
| | ID NO: 1685) | NO: 44) | GTKVDIK | (SEQ ID NO: |
| | | | (SEQ ID | 45) |
| | | | NO: 1683) | |
| PMAB2 | QVQLVQSGAEVK | ASTKGPSVFPLAPSSKSTSGGTAALGCLVKDYFP | DIQMTQSPSS | RTVAAPSVFIF |
| 42 | KPGASVKVSCKA | EPVTVSWNSGALTSGVHTFPAVLQSSGLYSLSSV | LSASVGDRVT | PPSDEQLKSGT |
| | SGYSFTSYYMHW | VTVPSSSLGTQTYICNVNHKPSNTKVDKKVEPKS | ITCQASQSIS | ASVVCLLNNFY |
| | VRQAPGQGLEWM | CDKTHTCPPCPAPEAAGAPSVFLFPPKPKDTLMI | SYLAWYQQKP | PREAKVQWKVD |
| | GIIQPSGGSTSY | SRTPEVTCVVVDVSHEDPEVKENWYVDGVEVHNA | GKAPKLLIYA | NALQSGNSQES |
| | AQKFQGRVTMTR | KTKPREEQYNSTYRVVSVLTVLHQDWLNGKEYKC | ASSLQSGVPS | VTEQDSKDSTY |
| | DTSTSTVYMELS | KVSNKALPAPIEKTISKAKGQPREPQVYTLPPSR | RFSGSGSGTD | SLSSTLTLSKA |
| | SLRSEDTAVYYC | EEMTKNQVSLTCLVKGFYPSDIAVEWESNGQPEN | FTLTISSLQP | DYEKHKVYACE |
| | ASGWVYWGQGTL | NYKTTPPVLDSDGSFFLYSKLTVDKSRWQQGNVE | EDFATYYCQQ | VTHQGLSSPVT |
| | VTVSS (SEQ | SCSVMHEALHNHYTQKSLSLSPG (SEQ ID | SYSTPPTFGP | KSENRGEC |
| | ID NO: 1685) | NO: 44) | GTKVDIK | (SEQ ID NO: |
| | | | (SEQ ID | 45) |
| | | | NO: 1684) | |
| PMAB2 | QVQLVQSGAEVK | ASTKGPSVFPLAPSSKSTSGGTAALGCLVKDYFP | DIQMTQSPSS | RTVAAPSVFIF |
| 43 | KPGASVKVSCKA | EPVTVSWNSGALTSGVHTFPAVLQSSGLYSLSSV | LSASVGDRVT | PPSDEQLKSGT |
| | SGYSFTSYYMHW | VTVPSSSLGTQTYICNVNHKPSNTKVDKKVEPKS | ITCRASQSIS | ASVVCLLNNFY |
| | VRQAPGQGLEWM | CDKTHTCPPCPAPEAAGAPSVELFPPKPKDTLMI | SYLAWYQQKP | PREAKVQWKVD |
| | GIIQPSGGSTSY | SRTPEVTCVVVDVSHEDPEVKENWYVDGVEVHNA | GKAPKLLIYA | NALQSGNSQES |
| | AQKFQGRVTMTR | KTKPREEQYNSTYRVVSVLTVLHQDWLNGKEYKC | ASSLQSGVPS | VTEQDSKDSTY |
| | DTSTSTVYMELS | KVSNKALPAPIEKTISKAKGQPREPQVYTLPPSR | RFSGSGSGTD | SLSSTLTLSKA |
| | SLRSEDTAVYYC | EEMTKNQVSLTCLVKGFYPSDIAVEWESNGQPEN | FTLTISSLQP | DYEKHKVYACE |
| | ASGWVYWGQGTL | NYKTTPPVLDSDGSFFLYSKLTVDKSRWQQGNVE | EDFATYYCQQ | VTHQGLSSPVT |
| | VTVSS (SEQ | SCSVMHEALHNHYTQKSLSLSPG (SEQ ID | SYSTPPTFGP | KSENRGEC |
| | ID NO: 1685) | NO: 44) | GTKVDIK | (SEQ ID NO: |
| | | | (SEQ ID | 45) |
| | | | NO: 1479) | |
| PMAB2 | QVQLVQSGAEVK | ASTKGPSVFPLAPSSKSTSGGTAALGCLVKDYFP | DIQMTQSPSS | RTVAAPSVFIF |
| 44 | KPGASVKVSCKA | EPVTVSWNSGALTSGVHTFPAVLQSSGLYSLSSV | LSASVGDRVT | PPSDEQLKSGT |
| | SGYSFTTYYMHW | VTVPSSSLGTQTYICNVNHKPSNTKVDKKVEPKS | ITCQASRDIK | ASVVCLLNNFY |
| | VRQAPGQGLEWM | CDKTHTCPPCPAPEAAGAPSVELFPPKPKDTLMI | NYLAWYQQKP | PREAKVQWKVD |
| | GIIQPSGGSTSY | SRTPEVTCVVVDVSHEDPEVKENWYVDGVEVHNA | GKAPKLLIYA | NALQSGNSQES |
| | AQKFQGRVTMTR | KTKPREEQYNSTYRVVSVLTVLHQDWLNGKEYKC | ASSLQSGVPS | VTEQDSKDSTY |
| | DTSTSTVYMELS | KVSNKALPAPIEKTISKAKGQPREPQVYTLPPSR | RFSGSGSGTD | SLSSTLTLSKA |
| | SLRSEDTAVYYC | EEMTKNQVSLTCLVKGFYPSDIAVEWESNGQPEN | FTLTISSLQP | DYEKHKVYACE |
| | ASGWVYWGQGTL | NYKTTPPVLDSDGSFFLYSKLTVDKSRWQQGNVE | EDFATYYCQQ | VTHQGLSSPVT |
| | VTVSS (SEQ | SCSVMHEALHNHYTQKSLSLSPG (SEQ ID | SYSTPPTFGP | KSENRGEC |
| | ID NO: 1584) | NO: 44) | GTKVDIK | (SEQ ID NO: |
| | | | (SEQ ID | 45) |
| | | | NO: 1449) | |
| PMAB2 | QVQLVQSGAEVK | ASTKGPSVFPLAPSSKSTSGGTAALGCLVKDYFP | DIQMTQSPSS | RTVAAPSVFIF |
| 45 | KPGASVKVSCKA | EPVTVSWNSGALTSGVHTFPAVLQSSGLYSLSSV | LSASVGDRVT | PPSDEQLKSGT |
| | SGYTFTTYYMHW | VTVPSSSLGTQTYICNVNHKPSNTKVDKKVEPKS | ITCQASRDIK | ASVVCLLNNFY |
| | VRQAPGQGLEWM | CDKTHTCPPCPAPEAAGAPSVFLFPPKPKDTLMI | NYLAWYQQKP | PREAKVQWKVD |
| | GIIQPSGGSTSY | SRTPEVTCVVVDVSHEDPEVKENWYVDGVEVHNA | GKAPKLLIYA | NALQSGNSQES |
| | AQKFQGRVTMTR | KTKPREEQYNSTYRVVSVLTVLHQDWLNGKEYKC | ASSLQSGVPS | VTEQDSKDSTY |
| | DTSTSTVYMELS | KVSNKALPAPIEKTISKAKGQPREPQVYTLPPSR | RFSGSGSGTD | SLSSTLTLSKA |
| | SLRSEDTAVYYC | EEMTKNQVSLTCLVKGFYPSDIAVEWESNGQPEN | FTLTISSLQP | DYEKHKVYACE |
| | ASGWVYWGQGTL | NYKTTPPVLDSDGSFFLYSKLTVDKSRWQQGNVE | EDFATYYCQQ | VTHQGLSSPVT |
| | VTVSS (SEQ | SCSVMHEALHNHYTQKSLSLSPG (SEQ ID | SYSTPPTFGP | KSENRGEC |
| | ID NO: 1679) | NO: 44) | GTKVDIK | (SEQ ID NO: |
| | | | (SEQ ID | 45) |
| | | | NO: 1449) | |
| PMAB2 | QVQLVQSGAEVK | ASTKGPSVFPLAPSSKSTSGGTAALGCLVKDYFP | DIQMTQSPSS | RTVAAPSVFIF |
| 46 | KPGASVKVSCKA | EPVTVSWNSGALTSGVHTFPAVLQSSGLYSLSSV | LSASVGDRVT | PPSDEQLKSGT |
| | SGYSFTSYYMHW | VTVPSSSLGTQTYICNVNHKPSNTKVDKKVEPKS | ITCQASRDIK | ASVVCLLNNFY |
| | VRQAPGQGLEWM | CDKTHTCPPCPAPEAAGAPSVELFPPKPKDTLMI | NYLAWYQQKP | PREAKVQWKVD |
| | GIIQPSGGSTSY | SRTPEVTCVVVDVSHEDPEVKENWYVDGVEVHNA | GKAPKLLIYA | NALQSGNSQES |
| | AQKFQGRVTMTR | KTKPREEQYNSTYRVVSVLTVLHQDWLNGKEYKC | ASSLQSGVPS | VTEQDSKDSTY |
| | DTSTSTVYMELS | KVSNKALPAPIEKTISKAKGQPREPQVYTLPPSR | RFSGSGSGTD | SLSSTLTLSKA |
| | SLRSEDTAVYYC | EEMTKNQVSLTCLVKGFYPSDIAVEWESNGQPEN | FTLTISSLQP | DYEKHKVYACE |
| | ASGWVYWGQGTL | NYKTTPPVLDSDGSFFLYSKLTVDKSRWQQGNVE | EDFATYYCQQ | VTHQGLSSPVT |
| | VTVSS (SEQ | SCSVMHEALHNHYTQKSLSLSPG (SEQ ID | SYSTPPTFGP | KSENRGEC |
| | ID NO: 1685) | NO: 44) | GTKVDIK | (SEQ ID NO: |
| | | | (SEQ ID | 45) |
| | | | NO: 1449) | |
| PMAB2 | QVQLVQSGAEVK | ASTKGPSVFPLAPSSKSTSGGTAALGCLVKDYFP | DIQMTQSPSS | RTVAAPSVFIF |
| 47 | KPGASVKVSCKA | EPVTVSWNSGALTSGVHTFPAVLQSSGLYSLSSV | LSASVGDRVT | PPSDEQLKSGT |
| | SGYTFTSYYMHW | VTVPSSSLGTQTYICNVNHKPSNTKVDKKVEPKS | ITCQASRDIK | ASVVCLLNNFY |
| | VRQAPGQGLEWM | CDKTHTCPPCPAPEAAGAPSVFLFPPKPKDTLMI | NYLAWYQQKP | PREAKVQWKVD |
| | GIIQPSGGSTSY | SRTPEVTCVVVDVSHEDPEVKENWYVDGVEVHNA | GKAPKLLIYA | NALQSGNSQES |
| | AQKFQGRVTMTR | KTKPREEQYNSTYRVVSVLTVLHQDWLNGKEYKC | ASSLQSGVPS | VTEQDSKDSTY |
| | DTSTSTVYMELS | KVSNKALPAPIEKTISKAKGQPREPQVYTLPPSR | RFSGSGSGTD | SLSSTLTLSKA |
| | SLRSEDTAVYYC | EEMTKNQVSLTCLVKGFYPSDIAVEWESNGQPEN | FTLTISSLQP | DYEKHKVYACE |
| | ASGWVYWGQGTL | NYKTTPPVLDSDGSFFLYSKLTVDKSRWQQGNVE | EDFATYYCQQ | VTHQGLSSPVT |
| | VTVSS (SEQ | SCSVMHEALHNHYTQKSLSLSPG (SEQ ID | SYSTPPTEGP | KSENRGEC |
| | ID NO: 1686) | NO: 44) | GTKVDIK | (SEQ ID NO: |
| | | | (SEQ ID | 45) |
| | | | NO: 1449) | |
| PMAB2 | QVQLVQSGAEVK | ASTKGPSVFPLAPSSKSTSGGTAALGCLVKDYFP | DIQMTQSPSS | RTVAAPSVFIF |
| 48 | KPGASVKVSCKA | EPVTVSWNSGALTSGVHTFPAVLQSSGLYSLSSV | LSASVGDRVT | PPSDEQLKSGT |
| | SGYSFTTYYMHW | VTVPSSSLGTQTYICNVNHKPSNTKVDKKVEPKS | ITCRASQDIK | ASVVCLLNNFY |
| | VRQAPGQGLEWM | CDKTHTCPPCPAPEAAGAPSVELFPPKPKDTLMI | NYLAWYQQKP | PREAKVQWKVD |
| | GIIQPSGGSTSY | SRTPEVTCVVVDVSHEDPEVKENWYVDGVEVHNA | GKAPKLLIYA | NALQSGNSQES |
| | AQKFQGRVTMTR | KTKPREEQYNSTYRVVSVLTVLHQDWLNGKEYKC | ASSLQSGVPS | VTEQDSKDSTY |
| | DTSTSTVYMELS | KVSNKALPAPIEKTISKAKGQPREPQVYTLPPSR | RFSGSGSGTD | SLSSTLTLSKA |
| | SLRSEDTAVYYC | EEMTKNQVSLTCLVKGFYPSDIAVEWESNGQPEN | FTLTISSLQP | DYEKHKVYACE |
| | ASGWVYWGQGTL | NYKTTPPVLDSDGSFFLYSKLTVDKSRWQQGNVE | EDFATYYCQQ | VTHQGLSSPVT |
| | VTVSS (SEQ | SCSVMHEALHNHYTQKSLSLSPG (SEQ ID | SYSTPPTFGP | KSENRGEC |
| | ID NO: 1584) | NO: 44) | GTKVDIK | (SEQ ID NO: |
| | | | (SEQ ID | 45) |
| | | | NO: 1687) | |
| PMAB2 | QVQLVQSGAEVK | ASTKGPSVFPLAPSSKSTSGGTAALGCLVKDYEP | DIQMTQSPSS | RTVAAPSVFIF |
| 49 | KPGASVKVSCKA | EPVTVSWNSGALTSGVHTFPAVLQSSGLYSLSSV | LSASVGDRVT | PPSDEQLKSGT |
| | SGYSFTTYYMHW | VTVPSSSLGTQTYICNVNHKPSNTKVDKKVEPKS | ITCRRVGSIK | ASVVCLLNNFY |
| | VRQAPGQGLEWM | CDKTHTCPPCPAPEAAGAPSVELFPPKPKDTLMI | NYLAWYQQKP | PREAKVQWKVD |
| | GIIQPSGGSTSY | SRTPEVTCVVVDVSHEDPEVKFNWYVDGVEVHNA | GKAPKLLIYA | NALQSGNSQES |
| | AQKFQGRVTMTR | KTKPREEQYNSTYRVVSVLTVLHQDWLNGKEYKC | ASSLQSGVPS | VTEQDSKDSTY |
| | DTSTSTVYMELS | KVSNKALPAPIEKTISKAKGQPREPQVYTLPPSR | RFSGSGSGTD | SLSSTLTLSKA |
| | SLRSEDTAVYYC | EEMTKNQVSLTCLVKGFYPSDIAVEWESNGQPEN | FTLTISSLQP | DYEKHKVYACE |
| | ASGWVYWGQGTL | NYKTTPPVLDSDGSFFLYSKLTVDKSRWQQGNVF | EDFATYYCQQ | VTHQGLSSPVT |
| | VTVSS (SEQ | SCSVMHEALHNHYTQKSLSLSPG (SEQ ID | SYSTPPTFGP | KSENRGEC |
| | ID NO: 1584) | NO: 44) | GTKVDIK | (SEQ ID NO: |
| | | | (SEQ ID | 45) |
| | | | NO: 1688) | |
| PMAB2 | QVQLVQSGAEVK | ASTKGPSVFPLAPSSKSTSGGTAALGCLVKDYFP | DIQMTQSPSS | RTVAAPSVFIF |
| 50 | KPGASVKVSCKA | EPVTVSWNSGALTSGVHTFPAVLQSSGLYSLSSV | LSASVGDRVT | PPSDEQLKSGT |
| | SGYSFTTYYMHW | VTVPSSSLGTQTYICNVNHKPSNTKVDKKVEPKS | ITCRASRDIS | ASVVCLLNNFY |
| | VRQAPGQGLEWM | CDKTHTCPPCPAPEAAGAPSVELFPPKPKDTLMI | NYLAWYQQKP | PREAKVQWKVD |
| | GIIQPSGGSTSY | SRTPEVTCVVVDVSHEDPEVKENWYVDGVEVHNA | GKAPKLLIYA | NALQSGNSQES |
| | AQKFQGRVTMTR | KTKPREEQYNSTYRVVSVLTVLHQDWLNGKEYKC | ASSLQSGVPS | VTEQDSKDSTY |
| | DTSTSTVYMELS | KVSNKALPAPIEKTISKAKGQPREPQVYTLPPSR | RFSGSGSGTD | SLSSTLTLSKA |
| | SLRSEDTAVYYC | EEMTKNQVSLTCLVKGFYPSDIAVEWESNGQPEN | FTLTISSLQP | DYEKHKVYACE |
| | ASGWVYWGQGTL | NYKTTPPVLDSDGSFFLYSKLTVDKSRWQQGNVF | EDFATYYCQQ | VTHQGLSSPVT |
| | VTVSS (SEQ | SCSVMHEALHNHYTQKSLSLSPG (SEQ ID | SYSTPPTFGP | KSENRGEC |
| | ID NO: 1584) | NO: 44) | GTKVDIK | (SEQ ID NO: |
| | | | (SEQ ID | 45) |
| | | | NO: 1689) | |
| PMAB2 | QVQLVQSGAEVK | ASTKGPSVFPLAPSSKSTSGGTAALGCLVKDYEP | DIQMTQSPSS | RTVAAPSVFIF |
| 51 | KPGASVKVSCKA | EPVTVSWNSGALTSGVHTFPAVLQSSGLYSLSSV | LSASVGDRVT | PPSDEQLKSGT |
| | SGYSFTTYYMHW | VTVPSSSLGTQTYICNVNHKPSNTKVDKKVEPKS | ITCRASRDIK | ASVVCLLNNFY |
| | VRQAPGQGLEWM | CDKTHTCPPCPAPEAAGAPSVFLFPPKPKDTLMI | SYLAWYQQKP | PREAKVQWKVD |
| | GIIQPSGGSTSY | SRTPEVTCVVVDVSHEDPEVKFNWYVDGVEVHNA | GKAPKLLIYA | NALQSGNSQES |
| | AQKFQGRVTMTR | KTKPREEQYNSTYRVVSVLTVLHQDWLNGKEYKC | ASSLQSGVPS | VTEQDSKDSTY |
| | DTSTSTVYMELS | KVSNKALPAPIEKTISKAKGQPREPQVYTLPPSR | RFSGSGSGTD | SLSSTLTLSKA |
| | SLRSEDTAVYYC | EEMTKNQVSLTCLVKGFYPSDIAVEWESNGQPEN | FTLTISSLQP | DYEKHKVYACE |
| | ASGWVYWGQGTL | NYKTTPPVLDSDGSFFLYSKLTVDKSRWQQGNVE | EDFATYYCQQ | VTHQGLSSPVT |
| | VTVSS (SEQ | SCSVMHEALHNHYTQKSLSLSPG (SEQ ID | SYSTPPTFGP | KSENRGEC |
| | ID NO: 1584) | NO: 44) | GTKVDIK | (SEQ ID NO: |
| | | | (SEQ ID | 45) |
| | | | NO: 1690) | |
| PMAB2 | QVQLVQSGAEVK | ASTKGPSVFPLAPSSKSTSGGTAALGCLVKDYFP | DIQMTQSPSS | RTVAAPSVFIF |
| 52 | KPGASVKVSCKA | EPVTVSWNSGALTSGVHTFPAVLQSSGLYSLSSV | LSASVGDRVT | PPSDEQLKSGT |
| | SGYSFTTYYMHW | VTVPSSSLGTQTYICNVNHKPSNTKVDKKVEPKS | ITCQASQSIK | ASVVCLLNNFY |
| | VRQAPGQGLEWM | CDKTHTCPPCPAPEAAGAPSVFLFPPKPKDTLMI | NYLAWYQQKP | PREAKVQWKVD |
| | GIIQPSGGSTSY | SRTPEVTCVVVDVSHEDPEVKENWYVDGVEVHNA | GKAPKLLIYA | NALQSGNSQES |
| | AQKFQGRVTMTR | KTKPREEQYNSTYRVVSVLTVLHQDWLNGKEYKC | ASSLQSGVPS | VTEQDSKDSTY |
| | DTSTSTVYMELS | KVSNKALPAPIEKTISKAKGQPREPQVYTLPPSR | RFSGSGSGTD | SLSSTLTLSKA |
| | SLRSEDTAVYYC | EEMTKNQVSLTCLVKGFYPSDIAVEWESNGQPEN | FTLTISSLQP | DYEKHKVYACE |
| | ASGWVYWGQGTL | NYKTTPPVLDSDGSFFLYSKLTVDKSRWQQGNVE | EDFATYYCQQ | VTHQGLSSPVT |
| | VTVSS (SEQ | SCSVMHEALHNHYTQKSLSLSPG (SEQ ID | SYSTPPTFGP | KSENRGEC |
| | ID NO: 1584) | NO: 44) | GTKVDIK | (SEQ ID NO: |
| | | | (SEQ ID | 45) |
| | | | NO: 1691) | |
| PMAB2 | QVQLVQSGAEVK | ASTKGPSVFPLAPSSKSTSGGTAALGCLVKDYFP | DIQMTQSPSS | RTVAAPSVFIF |
| 53 | KPGASVKVSCKA | EPVTVSWNSGALTSGVHTFPAVLQSSGLYSLSSV | LSASVGDRVT | PPSDEQLKSGT |
| | SGYSFTTYYMHW | VTVPSSSLGTQTYICNVNHKPSNTKVDKKVEPKS | ITCQASQDIS | ASVVCLLNNFY |
| | VRQAPGQGLEWM | CDKTHTCPPCPAPEAAGAPSVFLFPPKPKDTLMI | NYLAWYQQKP | PREAKVQWKVD |
| | GIIQPSGGSTSY | SRTPEVTCVVVDVSHEDPEVKENWYVDGVEVHNA | GKAPKLLIYA | NALQSGNSQES |
| | AQKFQGRVTMTR | KTKPREEQYNSTYRVVSVLTVLHQDWLNGKEYKC | ASSLQSGVPS | VTEQDSKDSTY |
| | DTSTSTVYMELS | KVSNKALPAPIEKTISKAKGQPREPQVYTLPPSR | RFSGSGSGTD | SLSSTLTLSKA |
| | SLRSEDTAVYYC | EEMTKNQVSLTCLVKGFYPSDIAVEWESNGQPEN | FTLTISSLQP | DYEKHKVYACE |
| | ASGWVYWGQGTL | NYKTTPPVLDSDGSFFLYSKLTVDKSRWQQGNVE | EDFATYYCQQ | VTHQGLSSPVT |
| | VTVSS (SEQ | SCSVMHEALHNHYTQKSLSLSPG (SEQ ID | SYSTPPTFGP | KSENRGEC |
| | ID NO: 1584) | NO: 44) | GTKVDIK | (SEQ ID NO: |
| | | | (SEQ ID | 45) |
| | | | NO: 1692) | |
| PMAB2 | QVQLVQSGAEVK | ASTKGPSVFPLAPSSKSTSGGTAALGCLVKDYFP | DIQMTQSPSS | RTVAAPSVFIF |
| 54 | KPGASVKVSCKA | EPVTVSWNSGALTSGVHTFPAVLQSSGLYSLSSV | LSASVGDRVT | PPSDEQLKSGT |
| | SGYSFTTYYMHW | VTVPSSSLGTQTYICNVNHKPSNTKVDKKVEPKS | ITCQASQDIK | ASVVCLLNNFY |
| | VRQAPGQGLEWM | CDKTHTCPPCPAPEAAGAPSVFLFPPKPKDTLMI | SYLAWYQQKP | PREAKVQWKVD |
| | GIIQPSGGSTSY | SRTPEVTCVVVDVSHEDPEVKENWYVDGVEVHNA | GKAPKLLIYA | NALQSGNSQES |
| | AQKFQGRVTMTR | KTKPREEQYNSTYRVVSVLTVLHQDWLNGKEYKC | ASSLQSGVPS | VTEQDSKDSTY |
| | DTSTSTVYMELS | KVSNKALPAPIEKTISKAKGQPREPQVYTLPPSR | RFSGSGSGTD | SLSSTLTLSKA |
| | SLRSEDTAVYYC | EEMTKNQVSLTCLVKGFYPSDIAVEWESNGQPEN | FTLTISSLQP | DYEKHKVYACE |
| | ASGWVYWGQGTL | NYKTTPPVLDSDGSFFLYSKLTVDKSRWQQGNVE | EDFATYYCQQ | VTHQGLSSPVT |
| | VTVSS (SEQ | SCSVMHEALHNHYTQKSLSLSPG (SEQ ID | SYSTPPTFGP | KSENRGEC |
| | ID NO: 1584) | NO: 44) | GTKVDIK | (SEQ ID NO: |
| | | | (SEQ ID | 45) |
| | | | NO: 1693) | |
| PMAB2 | QVQLVQSGAEVK | ASTKGPSVFPLAPSSKSTSGGTAALGCLVKDYFP | DIQMTQSPSS | RTVAAPSVFIF |
| 55 | KPGASVKVSCKA | EPVTVSWNSGALTSGVHTFPAVLQSSGLYSLSSV | LSASVGDRVT | PPSDEQLKSGT |
| | SGYSFTTYYMHW | VTVPSSSLGTQTYICNVNHKPSNTKVDKKVEPKS | ITCQASRSIS | ASVVCLLNNFY |
| | VRQAPGQGLEWM | CDKTHTCPPCPAPEAAGAPSVELFPPKPKDTLMI | NYLAWYQQKP | PREAKVQWKVD |
| | GIIQPSGGSTSY | SRTPEVTCVVVDVSHEDPEVKFNWYVDGVEVHNA | GKAPKLLIYA | NALQSGNSQES |
| | AQKFQGRVTMTR | KTKPREEQYNSTYRVVSVLTVLHQDWLNGKEYKC | ASSLQSGVPS | VTEQDSKDSTY |
| | DTSTSTVYMELS | KVSNKALPAPIEKTISKAKGQPREPQVYTLPPSR | RFSGSGSGTD | SLSSTLTLSKA |
| | SLRSEDTAVYYC | EEMTKNQVSLTCLVKGFYPSDIAVEWESNGQPEN | FTLTISSLQP | DYEKHKVYACE |
| | ASGWVYWGQGTL | NYKTTPPVLDSDGSFFLYSKLTVDKSRWQQGNVE | EDFATYYCQQ | VTHQGLSSPVT |
| | VTVSS (SEQ | SCSVMHEALHNHYTQKSLSLSPG (SEQ ID | SYSTPPTFGP | KSENRGEC |
| | ID NO: 1584) | NO: 44) | GTKVDIK | (SEQ ID NO: |
| | | | (SEQ ID | 45) |
| | | | NO: 1694) | |
| PMAB2 | QVQLVQSGAEVK | ASTKGPSVFPLAPSSKSTSGGTAALGCLVKDYFP | DIQMTQSPSS | RTVAAPSVFIF |
| 56 | KPGASVKVSCKA | EPVTVSWNSGALTSGVHTFPAVLQSSGLYSLSSV | LSASVGDRVT | PPSDEQLKSGT |
| | SGYSFTTYYMHW | VTVPSSSLGTQTYICNVNHKPSNTKVDKKVEPKS | ITCQASRSIK | ASVVCLLNNFY |
| | VRQAPGQGLEWM | CDKTHTCPPCPAPEAAGAPSVELFPPKPKDTLMI | SYLAWYQQKP | PREAKVQWKVD |
| | GIIQPSGGSTSY | SRTPEVTCVVVDVSHEDPEVKENWYVDGVEVHNA | GKAPKLLIYA | NALQSGNSQES |
| | AQKFQGRVTMTR | KTKPREEQYNSTYRVVSVLTVLHQDWLNGKEYKC | ASSLQSGVPS | VTEQDSKDSTY |
| | DTSTSTVYMELS | KVSNKALPAPIEKTISKAKGQPREPQVYTLPPSR | RFSGSGSGTD | SLSSTLTLSKA |
| | SLRSEDTAVYYC | EEMTKNQVSLTCLVKGFYPSDIAVEWESNGQPEN | FTLTISSLQP | DYEKHKVYACE |
| | ASGWVYWGQGTL | NYKTTPPVLDSDGSFFLYSKLTVDKSRWQQGNVE | EDFATYYCQQ | VTHQGLSSPVT |
| | VTVSS (SEQ | SCSVMHEALHNHYTQKSLSLSPG (SEQ ID | SYSTPPTFGP | KSENRGEC |
| | ID NO: 1584) | NO: 44) | GTKVDIK | (SEQ ID NO: |
| | | | (SEQ ID | 45) |
| | | | NO: 1695) | |
| PMAB2 | QVQLVQSGAEVK | ASTKGPSVFPLAPSSKSTSGGTAALGCLVKDYFP | DIQMTQSPSS | RTVAAPSVFIF |
| 57 | KPGASVKVSCKA | EPVTVSWNSGALTSGVHTFPAVLQSSGLYSLSSV | LSASVGDRVT | PPSDEQLKSGT |
| | SGYSFTTYYMHW | VTVPSSSLGTQTYICNVNHKPSNTKVDKKVEPKS | ITCQASRDIS | ASVVCLLNNFY |
| | VRQAPGQGLEWM | CDKTHTCPPCPAPEAAGAPSVELFPPKPKDTLMI | SYLAWYQQKP | PREAKVQWKVD |
| | GIIQPSGGSTSY | SRTPEVTCVVVDVSHEDPEVKENWYVDGVEVHNA | GKAPKLLIYA | NALQSGNSQES |
| | AQKFQGRVTMTR | KTKPREEQYNSTYRVVSVLTVLHQDWLNGKEYKC | ASSLQSGVPS | VTEQDSKDSTY |
| | DTSTSTVYMELS | KVSNKALPAPIEKTISKAKGQPREPQVYTLPPSR | RFSGSGSGTD | SLSSTLTLSKA |
| | SLRSEDTAVYYC | EEMTKNQVSLTCLVKGFYPSDIAVEWESNGQPEN | FTLTISSLQP | DYEKHKVYACE |
| | ASGWVYWGQGTL | NYKTTPPVLDSDGSFFLYSKLTVDKSRWQQGNVE | EDFATYYCQQ | VTHQGLSSPVT |
| | VTVSS (SEQ | SCSVMHEALHNHYTQKSLSLSPG (SEQ ID | SYSTPPTFGP | KSENRGEC |
| | ID NO: 1584) | NO: 44) | GTKVDIK | (SEQ ID NO: |
| | | | (SEQ ID | 45) |
| | | | NO: 1696) | |
| PMAB2 | QVQLVQSGAEVK | ASTKGPSVFPLAPSSKSTSGGTAALGCLVKDYFP | DIQMTQSPSS | RTVAAPSVFIF |
| 58 | KPGASVKVSCKA | EPVTVSWNSGALTSGVHTFPAVLQSSGLYSLSSV | LSASVGDRVT | PPSDEQLKSGT |
| | SGYSFTTYYMHW | VTVPSSSLGTQTYICNVNHKPSNTKVDKKVEPKS | ITCRASQSIK | ASVVCLLNNFY |
| | VRQAPGQGLEWM | CDKTHTCPPCPAPEAAGAPSVFLFPPKPKDTLMI | NYLAWYQQKP | PREAKVQWKVD |
| | GIIQPSGGSTSY | SRTPEVTCVVVDVSHEDPEVKENWYVDGVEVHNA | GKAPKLLIYA | NALQSGNSQES |
| | AQKFQGRVTMTR | KTKPREEQYNSTYRVVSVLTVLHQDWLNGKEYKC | ASSLQSGVPS | VTEQDSKDSTY |
| | DTSTSTVYMELS | KVSNKALPAPIEKTISKAKGQPREPQVYTLPPSR | RFSGSGSGTD | SLSSTLTLSKA |
| | SLRSEDTAVYYC | EEMTKNQVSLTCLVKGFYPSDIAVEWESNGQPEN | FTLTISSLQP | DYEKHKVYACE |
| | ASGWVYWGQGTL | NYKTTPPVLDSDGSFFLYSKLTVDKSRWQQGNVE | EDFATYYCQQ | VTHQGLSSPVT |
| | VTVSS (SEQ | SCSVMHEALHNHYTQKSLSLSPG (SEQ ID | SYSTPPTFGP | KSENRGEC |
| | ID NO: 1584) | NO: 44) | GTKVDIK | (SEQ ID NO: |
| | | | (SEQ ID | 45) |
| | | | NO: 1697) | |
| PMAB2 | QVQLVQSGAEVK | ASTKGPSVFPLAPSSKSTSGGTAALGCLVKDYFP | DIQMTQSPSS | RTVAAPSVFIF |
| 59 | KPGASVKVSCKA | EPVTVSWNSGALTSGVHTFPAVLQSSGLYSLSSV | LSASVGDRVT | PPSDEQLKSGT |
| | SGYSFTTYYMHW | VTVPSSSLGTQTYICNVNHKPSNTKVDKKVEPKS | ITCRASQDIS | ASVVCLLNNFY |
| | VRQAPGQGLEWM | CDKTHTCPPCPAPEAAGAPSVFLFPPKPKDTLMI | NYLAWYQQKP | PREAKVQWKVD |
| | GIIQPSGGSTSY | SRTPEVTCVVVDVSHEDPEVKENWYVDGVEVHNA | GKAPKLLIYA | NALQSGNSQES |
| | AQKFQGRVTMTR | KTKPREEQYNSTYRVVSVLTVLHQDWLNGKEYKC | ASSLQSGVPS | VTEQDSKDSTY |
| | DTSTSTVYMELS | KVSNKALPAPIEKTISKAKGQPREPQVYTLPPSR | RFSGSGSGTD | SLSSTLTLSKA |
| | SLRSEDTAVYYC | EEMTKNQVSLTCLVKGFYPSDIAVEWESNGQPEN | FTLTISSLQP | DYEKHKVYACE |
| | ASGWVYWGQGTL | NYKTTPPVLDSDGSFFLYSKLTVDKSRWQQGNVE | EDFATYYCQQ | VTHQGLSSPVT |
| | VTVSS (SEQ | SCSVMHEALHNHYTQKSLSLSPG (SEQ ID | SYSTPPTFGP | KSENRGEC |
| | ID NO: 1584) | NO: 44) | GTKVDIK | (SEQ ID NO: |
| | | | 2ID | 45) |
| | | | NO: 1698) | |
| PMAB2 | QVQLVQSGAEVK | ASTKGPSVFPLAPSSKSTSGGTAALGCLVKDYEP | DIQMTQSPSS | RTVAAPSVFIF |
| 60 | KPGASVKVSCKA | EPVTVSWNSGALTSGVHTFPAVLQSSGLYSLSSV | LSASVGDRVT | PPSDEQLKSGT |
| | SGYSFTTYYMHW | VTVPSSSLGTQTYICNVNHKPSNTKVDKKVEPKS | ITCRASQDIK | ASVVCLLNNFY |
| | VRQAPGQGLEWM | CDKTHTCPPCPAPEAAGAPSVFLFPPKPKDTLMI | SYLAWYQQKP | PREAKVQWKVD |
| | GIIQPSGGSTSY | SRTPEVTCVVVDVSHEDPEVKENWYVDGVEVHNA | GKAPKLLIYA | NALQSGNSQES |
| | AQKFQGRVTMTR | KTKPREEQYNSTYRVVSVLTVLHQDWLNGKEYKC | ASSLQSGVPS | VTEQDSKDSTY |
| | DTSTSTVYMELS | KVSNKALPAPIEKTISKAKGQPREPQVYTLPPSR | RFSGSGSGTD | SLSSTLTLSKA |
| | SLRSEDTAVYYC | EEMTKNQVSLTCLVKGFYPSDIAVEWESNGQPEN | FTLTISSLQP | DYEKHKVYACE |
| | ASGWVYWGQGTL | NYKTTPPVLDSDGSFFLYSKLTVDKSRWQQGNVE | EDFATYYCQQ | VTHQGLSSPVT |
| | VTVSS (SEQ | SCSVMHEALHNHYTQKSLSLSPG (SEQ ID | SYSTPPTEGP | KSENRGEC |
| | ID NO: 1584) | NO: 44) | GTKVDIK | (SEQ ID NO: |
| | | | (SEQ ID | 45) |
| | | | NO: 1699) | |
| PMAB2 | QVQLVQSGAEVK | ASTKGPSVFPLAPSSKSTSGGTAALGCLVKDYEP | DIQMTQSPSS | RTVAAPSVFIF |
| 61 | KPGASVKVSCKA | EPVTVSWNSGALTSGVHTFPAVLQSSGLYSLSSV | LSASVGDRVT | PPSDEQLKSGT |
| | SGYSFTTYYMHW | VTVPSSSLGTQTYICNVNHKPSNTKVDKKVEPKS | ITCRASRSIS | ASVVCLLNNFY |
| | VRQAPGQGLEWM | CDKTHTCPPCPAPEAAGAPSVELFPPKPKDTLMI | NYLAWYQQKP | PREAKVQWKVD |
| | GIIQPSGGSTSY | SRTPEVTCVVVDVSHEDPEVKENWYVDGVEVHNA | GKAPKLLIYA | NALQSGNSQES |
| | AQKFQGRVTMTR | KTKPREEQYNSTYRVVSVLTVLHQDWLNGKEYKC | ASSLQSGVPS | VTEQDSKDSTY |
| | DTSTSTVYMELS | KVSNKALPAPIEKTISKAKGQPREPQVYTLPPSR | RFSGSGSGTD | SLSSTLTLSKA |
| | SLRSEDTAVYYC | EEMTKNQVSLTCLVKGFYPSDIAVEWESNGQPEN | FTLTISSLQP | DYEKHKVYACE |
| | ASGWVYWGQGTL | NYKTTPPVLDSDGSFFLYSKLTVDKSRWQQGNVE | EDFATYYCQQ | VTHQGLSSPVT |
| | VTVSS (SEQ | SCSVMHEALHNHYTQKSLSLSPG (SEQ ID | SYSTPPTEGP | KSENRGEC |
| | ID NO: 1584) | NO: 44) | GTKVDIK | (SEQ ID NO: |
| | | | (SEQ ID | 45) |
| | | | NO: 1700) | |
| PMAB2 | QVQLVQSGAEVK | ASTKGPSVFPLAPSSKSTSGGTAALGCLVKDYFP | DIQMTQSPSS | RTVAAPSVFIF |
| 62 | KPGASVKVSCKA | EPVTVSWNSGALTSGVHTFPAVLQSSGLYSLSSV | LSASVGDRVT | PPSDEQLKSGT |
| | SGYSFTTYYMHW | VTVPSSSLGTQTYICNVNHKPSNTKVDKKVEPKS | ITCRASRSIK | ASVVCLLNNFY |
| | VRQAPGQGLEWM | CDKTHTCPPCPAPEAAGAPSVELFPPKPKDTLMI | SYLAWYQQKP | PREAKVQWKVD |
| | GIIQPSGGSTSY | SRTPEVTCVVVDVSHEDPEVKENWYVDGVEVHNA | GKAPKLLIYA | NALQSGNSQES |
| | AQKFQGRVTMTR | KTKPREEQYNSTYRVVSVLTVLHQDWLNGKEYKC | ASSLQSGVPS | VTEQDSKDSTY |
| | DTSTSTVYMELS | KVSNKALPAPIEKTISKAKGQPREPQVYTLPPSR | RFSGSGSGTD | SLSSTLTLSKA |
| | SLRSEDTAVYYC | EEMTKNQVSLTCLVKGFYPSDIAVEWESNGQPEN | FTLTISSLQP | DYEKHKVYACE |
| | ASGWVYWGQGTL | NYKTTPPVLDSDGSFFLYSKLTVDKSRWQQGNVE | EDFATYYCQQ | VTHQGLSSPVT |
| | VTVSS (SEQ | SCSVMHEALHNHYTQKSLSLSPG (SEQ ID | SYSTPPTFGP | KSENRGEC |
| | ID NO: 1584) | NO: 44) | GTKVDIK | (SEQ ID NO: |
| | | | (SEQ ID | 45) |
| | | | NO: 1701) | |
| PMAB2 | QVQLVQSGAEVK | ASTKGPSVFPLAPSSKSTSGGTAALGCLVKDYFP | DIQMTQSPSS | RTVAAPSVFIF |
| 63 | KPGASVKVSCKA | EPVTVSWNSGALTSGVHTFPAVLQSSGLYSLSSV | LSASVGDRVT | PPSDEQLKSGT |
| | SGYSFTTYYMHW | VTVPSSSLGTQTYICNVNHKPSNTKVDKKVEPKS | ITCRASRDIS | ASVVCLLNNFY |
| | VRQAPGQGLEWM | CDKTHTCPPCPAPEAAGAPSVELFPPKPKDTLMI | SYLAWYQQKP | PREAKVQWKVD |
| | GIIQPSGGSTSY | SRTPEVTCVVVDVSHEDPEVKENWYVDGVEVHNA | GKAPKLLIYA | NALQSGNSQES |
| | AQKFQGRVTMTR | KTKPREEQYNSTYRVVSVLTVLHQDWLNGKEYKC | ASSLQSGVPS | VTEQDSKDSTY |
| | DTSTSTVYMELS | KVSNKALPAPIEKTISKAKGQPREPQVYTLPPSR | RFSGSGSGTD | SLSSTLTLSKA |
| | SLRSEDTAVYYC | EEMTKNQVSLTCLVKGFYPSDIAVEWESNGQPEN | FTLTISSLQP | DYEKHKVYACE |
| | ASGWVYWGQGTL | NYKTTPPVLDSDGSFFLYSKLTVDKSRWQQGNVE | EDFATYYCQQ | VTHQGLSSPVT |
| | VTVSS (SEQ | SCSVMHEALHNHYTQKSLSLSPG (SEQ ID | SYSTPPTFGP | KSENRGEC |
| | ID NO: 1584) | NO: 44) | GTKVDIK | (SEQ ID NO: |
| | | | (SEQ ID | 45) |
| | | | NO: 1702) | |
| PMAB2 | QVQLVQSGAEVK | ASTKGPSVFPLAPSSKSTSGGTAALGCLVKDYFP | DIQMTQSPSS | RTVAAPSVFIF |
| 64 | KPGASVKVSCKA | EPVTVSWNSGALTSGVHTFPAVLQSSGLYSLSSV | LSASVGDRVT | PPSDEQLKSGT |
| | SGYSFTTYYMHW | VTVPSSSLGTQTYICNVNHKPSNTKVDKKVEPKS | ITCQASQSIS | ASVVCLLNNFY |
| | VRQAPGQGLEWM | CDKTHTCPPCPAPEAAGAPSVELFPPKPKDTLMI | NYLAWYQQKP | PREAKVQWKVD |
| | GIIQPSGGSTSY | SRTPEVTCVVVDVSHEDPEVKENWYVDGVEVHNA | GKAPKLLIYA | NALQSGNSQES |
| | AQKFQGRVTMTR | KTKPREEQYNSTYRVVSVLTVLHQDWLNGKEYKC | ASSLQSGVPS | VTEQDSKDSTY |
| | DTSTSTVYMELS | KVSNKALPAPIEKTISKAKGQPREPQVYTLPPSR | RFSGSGSGTD | SLSSTLTLSKA |
| | SLRSEDTAVYYC | EEMTKNQVSLTCLVKGFYPSDIAVEWESNGQPEN | FTLTISSLQP | DYEKHKVYACE |
| | ASGWVYWGQGTL | NYKTTPPVLDSDGSFFLYSKLTVDKSRWQQGNVE | EDFATYYCQQ | VTHQGLSSPVT |
| | VTVSS (SEQ | SCSVMHEALHNHYTQKSLSLSPG (SEQ ID | SYSTPPTFGP | KSENRGEC |
| | ID NO: 1584) | NO: 44) | GTKVDIK | (SEQ ID NO: |
| | | | (SEQ ID | 45) |
| | | | NO: 1703) | |
| PMAB2 | QVQLVQSGAEVK | ASTKGPSVFPLAPSSKSTSGGTAALGCLVKDYFP | DIQMTQSPSS | RTVAAPSVFIF |
| 65 | KPGASVKVSCKA | EPVTVSWNSGALTSGVHTFPAVLQSSGLYSLSSV | LSASVGDRVT | PPSDEQLKSGT |
| | SGYSFTTYYMHW | VTVPSSSLGTQTYICNVNHKPSNTKVDKKVEPKS | ITCQASQSIK | ASVVCLLNNFY |
| | VRQAPGQGLEWM | CDKTHTCPPCPAPEAAGAPSVFLFPPKPKDTLMI | SYLAWYQQKP | PREAKVQWKVD |
| | GIIQPSGGSTSY | SRTPEVTCVVVDVSHEDPEVKENWYVDGVEVHNA | GKAPKLLIYA | NALQSGNSQES |
| | AQKFQGRVTMTR | KTKPREEQYNSTYRVVSVLTVLHQDWLNGKEYKC | ASSLQSGVPS | VTEQDSKDSTY |
| | DTSTSTVYMELS | KVSNKALPAPIEKTISKAKGQPREPQVYTLPPSR | RFSGSGSGTD | SLSSTLTLSKA |
| | SLRSEDTAVYYC | EEMTKNQVSLTCLVKGFYPSDIAVEWESNGQPEN | FTLTISSLQP | DYEKHKVYACE |
| | ASGWVYWGQGTL | NYKTTPPVLDSDGSFFLYSKLTVDKSRWQQGNVE | EDFATYYCQQ | VTHQGLSSPVT |
| | VTVSS (SEQ | SCSVMHEALHNHYTQKSLSLSPG (SEQ ID | SYSTPPTFGP | KSENRGEC |
| | ID NO: 1584) | NO: 44) | GTKVDIK | (SEQ ID NO: |
| | | | (SEQ ID | 45) |
| | | | NO: 1704) | |
| PMAB2 | QVQLVQSGAEVK | ASTKGPSVFPLAPSSKSTSGGTAALGCLVKDYFP | DIQMTQSPSS | RTVAAPSVFIE |
| 66 | KPGASVKVSCKA | EPVTVSWNSGALTSGVHTFPAVLQSSGLYSLSSV | LSASVGDRVT | PPSDEQLKSGT |
| | SGYSFTTYYMHW | VTVPSSSLGTQTYICNVNHKPSNTKVDKKVEPKS | ITCQASQDIS | ASVVCLLNNFY |
| | VRQAPGQGLEWM | CDKTHTCPPCPAPEAAGAPSVFLFPPKPKDTLMI | SYLAWYQQKP | PREAKVQWKVD |
| | GIIQPSGGSTSY | SRTPEVTCVVVDVSHEDPEVKENWYVDGVEVHNA | GKAPKLLIYA | NALQSGNSQES |
| | AQKFQGRVTMTR | KTKPREEQYNSTYRVVSVLTVLHQDWLNGKEYKC | ASSLQSGVPS | VTEQDSKDSTY |
| | DTSTSTVYMELS | KVSNKALPAPIEKTISKAKGQPREPQVYTLPPSR | RFSGSGSGTD | SLSSTLTLSKA |
| | SLRSEDTAVYYC | EEMTKNQVSLTCLVKGFYPSDIAVEWESNGQPEN | FTLTISSLQP | DYEKHKVYACE |
| | ASGWVYWGQGTL | NYKTTPPVLDSDGSFFLYSKLTVDKSRWQQGNVE | EDFATYYCQQ | VTHQGLSSPVT |
| | VTVSS (SEQ | SCSVMHEALHNHYTQKSLSLSPG (SEQ ID | SYSTPPTFGP | KSENRGEC |
| | ID NO: 1584) | NO: 44) | GTKVDIK | (SEQ ID NO: |
| | | | (SEQ ID | 45) |
| | | | NO: 1705) | |
| PMAB2 | QVQLVQSGAEVK | ASTKGPSVFPLAPSSKSTSGGTAALGCLVKDYFP | DIQMTQSPSS | RTVAAPSVFIF |
| 67 | KPGASVKVSCKA | EPVTVSWNSGALTSGVHTFPAVLQSSGLYSLSSV | LSASVGDRVT | PPSDEQLKSGT |
| | SGYSFTTYYMHW | VTVPSSSLGTQTYICNVNHKPSNTKVDKKVEPKS | ITCQASRSIS | ASVVCLLNNFY |
| | VRQAPGQGLEWM | CDKTHTCPPCPAPEAAGAPSVELFPPKPKDTLMI | SYLAWYQQKP | PREAKVQWKVD |
| | GIIQPSGGSTSY | SRTPEVTCVVVDVSHEDPEVKENWYVDGVEVHNA | GKAPKLLIYA | NALQSGNSQES |
| | AQKFQGRVTMTR | KTKPREEQYNSTYRVVSVLTVLHQDWLNGKEYKC | ASSLQSGVPS | VTEQDSKDSTY |
| | DTSTSTVYMELS | KVSNKALPAPIEKTISKAKGQPREPQVYTLPPSR | RFSGSGSGTD | SLSSTLTLSKA |
| | SLRSEDTAVYYC | EEMTKNQVSLTCLVKGFYPSDIAVEWESNGQPEN | FTLTISSLQP | DYEKHKVYACE |
| | ASGWVYWGQGTL | NYKTTPPVLDSDGSFFLYSKLTVDKSRWQQGNVE | EDFATYYCQQ | VTHQGLSSPVT |
| | VTVSS (SEQ | SCSVMHEALHNHYTQKSLSLSPG (SEQ ID | SYSTPPTFGP | KSENRGEC |
| | ID NO: 1584) | NO: 44) | GTKVDIK | (SEQ ID NO: |
| | | | (SEQ ID | 45) |
| | | | NO: 1706) | |
| PMAB2 | QVQLVQSGAEVK | ASTKGPSVFPLAPSSKSTSGGTAALGCLVKDYFP | DIQMTQSPSS | RTVAAPSVFIF |
| 68 | KPGASVKVSCKA | EPVTVSWNSGALTSGVHTFPAVLQSSGLYSLSSV | LSASVGDRVT | PPSDEQLKSGT |
| | SGYSFTTYYMHW | VTVPSSSLGTQTYICNVNHKPSNTKVDKKVEPKS | ITCRASQSIS | ASVVCLLNNFY |
| | VRQAPGQGLEWM | CDKTHTCPPCPAPEAAGAPSVFLFPPKPKDTLMI | NYLAWYQQKP | PREAKVQWKVD |
| | GIIQPSGGSTSY | SRTPEVTCVVVDVSHEDPEVKENWYVDGVEVHNA | GKAPKLLIYA | NALQSGNSQES |
| | AQKFQGRVTMTR | KTKPREEQYNSTYRVVSVLTVLHQDWLNGKEYKC | ASSLQSGVPS | VTEQDSKDSTY |
| | DTSTSTVYMELS | KVSNKALPAPIEKTISKAKGQPREPQVYTLPPSR | RFSGSGSGTD | SLSSTLTLSKA |
| | SLRSEDTAVYYC | EEMTKNQVSLTCLVKGFYPSDIAVEWESNGQPEN | FTLTISSLQP | DYEKHKVYACE |
| | ASGWVYWGQGTL | NYKTTPPVLDSDGSFFLYSKLTVDKSRWQQGNVE | EDFATYYCQQ | VTHQGLSSPVT |
| | VTVSS (SEQ | SCSVMHEALHNHYTQKSLSLSPG (SEQ ID | SYSTPPTEGP | KSENRGEC |
| | ID NO: 1584) | NO: 44) | GTKVDIK | (SEQ ID NO: |
| | | | (SEQ ID | 45) |
| | | | NO: 1680) | |
| PMAB2 | QVQLVQSGAEVK | ASTKGPSVFPLAPSSKSTSGGTAALGCLVKDYFP | DIQMTQSPSS | RTVAAPSVFIF |
| 69 | KPGASVKVSCKA | EPVTVSWNSGALTSGVHTFPAVLQSSGLYSLSSV | LSASVGDRVT | PPSDEQLKSGT |
| | SGYSFTTYYMHW | VTVPSSSLGTQTYICNVNHKPSNTKVDKKVEPKS | ITCRASQSIK | ASVVCLLNNFY |
| | VRQAPGQGLEWM | CDKTHTCPPCPAPEAAGAPSVELFPPKPKDTLMI | SYLAWYQQKP | PREAKVQWKVD |
| | GIIQPSGGSTSY | SRTPEVTCVVVDVSHEDPEVKENWYVDGVEVHNA | GKAPKLLIYA | NALQSGNSQES |
| | AQKFQGRVTMTR | KTKPREEQYNSTYRVVSVLTVLHQDWLNGKEYKC | ASSLQSGVPS | VTEQDSKDSTY |
| | DTSTSTVYMELS | KVSNKALPAPIEKTISKAKGQPREPQVYTLPPSR | RFSGSGSGTD | SLSSTLTLSKA |
| | SLRSEDTAVYYC | EEMTKNQVSLTCLVKGFYPSDIAVEWESNGQPEN | FTLTISSLQP | DYEKHKVYACE |
| | ASGWVYWGQGTL | NYKTTPPVLDSDGSFFLYSKLTVDKSRWQQGNVE | EDFATYYCQQ | VTHQGLSSPVT |
| | VTVSS (SEQ | SCSVMHEALHNHYTQKSLSLSPG (SEQ ID | SYSTPPTFGP | KSENRGEC |
| | ID NO: 1584) | NO: 44) | GTKVDIK | (SEQ ID NO: |
| | | | (SEQ ID | 45) |
| | | | NO: 1681) | |
| PMAB2 | QVQLVQSGAEVK | ASTKGPSVFPLAPSSKSTSGGTAALGCLVKDYFP | DIQMTQSPSS | RTVAAPSVFIF |
| 70 | KPGASVKVSCKA | EPVTVSWNSGALTSGVHTFPAVLQSSGLYSLSSV | LSASVGDRVT | PPSDEQLKSGT |
| | SGYSFTTYYMHW | VTVPSSSLGTQTYICNVNHKPSNTKVDKKVEPKS | ITCRASQDIS | ASVVCLLNNFY |
| | VRQAPGQGLEWM | CDKTHTCPPCPAPEAAGAPSVFLFPPKPKDTLMI | SYLAWYQQKP | PREAKVQWKVD |
| | GIIQPSGGSTSY | SRTPEVTCVVVDVSHEDPEVKENWYVDGVEVHNA | GKAPKLLIYA | NALQSGNSQES |
| | AQKFQGRVTMTR | KTKPREEQYNSTYRVVSVLTVLHQDWLNGKEYKC | ASSLQSGVPS | VTEQDSKDSTY |
| | DTSTSTVYMELS | KVSNKALPAPIEKTISKAKGQPREPQVYTLPPSR | RFSGSGSGTD | SLSSTLTLSKA |
| | SLRSEDTAVYYC | EEMTKNQVSLTCLVKGFYPSDIAVEWESNGQPEN | FTLTISSLQP | DYEKHKVYACE |
| | ASGWVYWGQGTL | NYKTTPPVLDSDGSFFLYSKLTVDKSRWQQGNVE | EDFATYYCQQ | VTHQGLSSPVT |
| | VTVSS (SEQ | SCSVMHEALHNHYTQKSLSLSPG (SEQ ID | SYSTPPTFGP | KSENRGEC |
| | ID NO: 1584) | NO: 44) | GTKVDIK | (SEQ ID NO: |
| | | | (SEQ ID | 45) |
| | | | NO: 1682) | |
| PMAB2 | QVQLVQSGAEVK | ASTKGPSVFPLAPSSKSTSGGTAALGCLVKDYFP | DIQMTQSPSS | RTVAAPSVFIF |
| 71 | KPGASVKVSCKA | EPVTVSWNSGALTSGVHTFPAVLQSSGLYSLSSV | LSASVGDRVT | PPSDEQLKSGT |
| | SGYSFTTYYMHW | VTVPSSSLGTQTYICNVNHKPSNTKVDKKVEPKS | ITCRASRSIS | ASVVCLLNNFY |
| | VRQAPGQGLEWM | CDKTHTCPPCPAPEAAGAPSVFLFPPKPKDTLMI | SYLAWYQQKP | PREAKVQWKVD |
| | GIIQPSGGSTSY | SRTPEVTCVVVDVSHEDPEVKENWYVDGVEVHNA | GKAPKLLIYA | NALQSGNSQES |
| | AQKFQGRVTMTR | KTKPREEQYNSTYRVVSVLTVLHQDWLNGKEYKC | ASSLQSGVPS | VTEQDSKDSTY |
| | DTSTSTVYMELS | KVSNKALPAPIEKTISKAKGQPREPQVYTLPPSR | RFSGSGSGTD | SLSSTLTLSKA |
| | SLRSEDTAVYYC | EEMTKNQVSLTCLVKGFYPSDIAVEWESNGQPEN | FTLTISSLQP | DYEKHKVYACE |
| | ASGWVYWGQGTL | NYKTTPPVLDSDGSFFLYSKLTVDKSRWQQGNVE | EDFATYYCQQ | VTHQGLSSPVT |
| | VTVSS (SEQ | SCSVMHEALHNHYTQKSLSLSPG (SEQ ID | SYSTPPTFGP | KSENRGEC |
| | ID NO: 1584) | NO: 44) | GTKVDIK | (SEQ ID NO: |
| | | | (SEQ ID | 45) |
| | | | NO: 1683) | |
| PMAB2 | QVQLVQSGAEVK | ASTKGPSVFPLAPSSKSTSGGTAALGCLVKDYFP | DIQMTQSPSS | RTVAAPSVFIF |
| 72 | KPGASVKVSCKA | EPVTVSWNSGALTSGVHTFPAVLQSSGLYSLSSV | LSASVGDRVT | PPSDEQLKSGT |
| | SGYSFTTYYMHW | VTVPSSSLGTQTYICNVNHKPSNTKVDKKVEPKS | ITCQASQSIS | ASVVCLLNNFY |
| | VRQAPGQGLEWM | CDKTHTCPPCPAPEAAGAPSVELFPPKPKDTLMI | SYLAWYQQKP | PREAKVQWKVD |
| | GIIQPSGGSTSY | SRTPEVTCVVVDVSHEDPEVKFNWYVDGVEVHNA | GKAPKLLIYA | NALQSGNSQES |
| | AQKFQGRVTMTR | KTKPREEQYNSTYRVVSVLTVLHQDWLNGKEYKC | ASSLQSGVPS | VTEQDSKDSTY |
| | DTSTSTVYMELS | KVSNKALPAPIEKTISKAKGQPREPQVYTLPPSR | RFSGSGSGTD | SLSSTLTLSKA |
| | SLRSEDTAVYYC | EEMTKNQVSLTCLVKGFYPSDIAVEWESNGQPEN | FTLTISSLQP | DYEKHKVYACE |
| | ASGWVYWGQGTL | NYKTTPPVLDSDGSFFLYSKLTVDKSRWQQGNVE | EDFATYYCQQ | VTHQGLSSPVT |
| | VTVSS (SEQ | SCSVMHEALHNHYTQKSLSLSPG (SEQ ID | SYSTPPTFGP | KSENRGEC |
| | ID NO: 1584) | NO: 44) | GTKVDIK | (SEQ ID NO: |
| | | | (SEQ ID | 45) |
| | | | NO: 1684) | |
| PMAB2 | QVQLVQSGAEVK | ASTKGPSVFPLAPSSKSTSGGTAALGCLVKDYFP | DIQMTQSPSS | RTVAAPSVFIF |
| 73 | KPGASVKVSCKA | EPVTVSWNSGALTSGVHTFPAVLQSSGLYSLSSV | LSASVGDRVT | PPSDEQLKSGT |
| | SGYSFTTYYMHW | VTVPSSSLGTQTYICNVNHKPSNTKVDKKVEPKS | ITCRASQSIS | ASVVCLLNNFY |
| | VRQAPGQGLEWM | CDKTHTCPPCPAPEAAGAPSVFLFPPKPKDTLMI | SYLAWYQQKP | PREAKVQWKVD |
| | GIIQPSGGSTSY | SRTPEVTCVVVDVSHEDPEVKENWYVDGVEVHNA | GKAPKLLIYA | NALQSGNSQES |
| | AQKFQGRVTMTR | KTKPREEQYNSTYRVVSVLTVLHQDWLNGKEYKC | ASSLQSGVPS | VTEQDSKDSTY |
| | DTSTSTVYMELS | KVSNKALPAPIEKTISKAKGQPREPQVYTLPPSR | RFSGSGSGTD | SLSSTLTLSKA |
| | SLRSEDTAVYYC | EEMTKNQVSLTCLVKGFYPSDIAVEWESNGQPEN | FTLTISSLQP | DYEKHKVYACE |
| | ASGWVYWGQGTL | NYKTTPPVLDSDGSFFLYSKLTVDKSRWQQGNVE | EDFATYYCQQ | VTHQGLSSPVT |
| | VTVSS (SEQ | SCSVMHEALHNHYTQKSLSLSPG (SEQ ID | SYSTPPTFGP | KSENRGEC |
| | ID NO: 1584) | NO: 44) | GTKVDIK | (SEQ ID NO: |
| | | | (SEQ ID | 45) |
| | | | NO: 1479) | |
| PMAB2 | EVQLVQSGAEVK | ASTKGPSVFPLAPSSKSTSGGTAALGCLVKDYFP | DIQMTQSPSS | RTVAAPSVFIF |
| 74 | KPGASVKVSCKA | EPVTVSWNSGALTSGVHTFPAVLQSSGLYSLSSV | LSASVGDRVT | PPSDEQLKSGT |
| | SGYTFTTYYMHW | VTVPSSSLGTQTYICNVNHKPSNTKVDKKVEPKS | ITCQASRDIK | ASVVCLLNNFY |
| | VRQAPGQGLEWM | CDKTHTCPPCPAPEAAGAPSVELFPPKPKDTLMI | NYLAWYQQKP | PREAKVQWKVD |
| | GIINPSGGSTSY | SRTPEVTCVVVDVSHEDPEVKENWYVDGVEVHNA | GKAPKLLIYA | NALQSGNSQES |
| | AQKFQGRVTMTR | KTKPREEQYNSTYRVVSVLTVLHQDWLNGKEYKC | ASSLQSGVPS | VTEQDSKDSTY |
| | DTSTSTVYMELS | KVSNKALPAPIEKTISKAKGQPREPQVYTLPPSR | RFSGSGSGTD | SLSSTLTLSKA |
| | SLRSEDTAVYYC | EEMTKNQVSLTCLVKGFYPSDIAVEWESNGQPEN | FTLTISSLQP | DYEKHKVYACE |
| | ASGWVYWGQGTL | NYKTTPPVLDSDGSFFLYSKLTVDKSRWQQGNVE | EDFATYYCQQ | VTHQGLSSPVT |
| | VTVSS (SEQ | SCSVMHEALHNHYTQKSLSLSPG (SEQ ID | SYSTPPTFGP | KSENRGEC |
| | ID NO: 1707) | NO: 44) | GTKVDIK | (SEQ ID NO: |
| | | | (SEQ ID | 45) |
| | | | NO: 1449) | |
| PMAB2 | EVQLVQSGAEVK | ASTKGPSVFPLAPSSKSTSGGTAALGCLVKDYFP | DIQMTQSPSS | RTVAAPSVEIF |
| 75 | KPGASVKVSCKA | EPVTVSWNSGALTSGVHTFPAVLQSSGLYSLSSV | LSASVGDRVT | PPSDEQLKSGT |
| | SGYSFTSYYMHW | VTVPSSSLGTQTYICNVNHKPSNTKVDKKVEPKS | ITCQASRDIK | ASVVCLLNNFY |
| | VRQAPGQGLEWM | CDKTHTCPPCPAPEAAGAPSVELFPPKPKDTLMI | NYLAWYQQKP | PREAKVQWKVD |
| | GIINPSGGSTSY | SRTPEVTCVVVDVSHEDPEVKENWYVDGVEVHNA | GKAPKLLIYA | NALQSGNSQES |
| | AQKFQGRVTMTR | KTKPREEQYNSTYRVVSVLTVLHQDWLNGKEYKC | ASSLQSGVPS | VTEQDSKDSTY |
| | DTSTSTVYMELS | KVSNKALPAPIEKTISKAKGQPREPQVYTLPPSR | RFSGSGSGTD | SLSSTLTLSKA |
| | SLRSEDTAVYYC | EEMTKNQVSLTCLVKGFYPSDIAVEWESNGQPEN | FTLTISSLQP | DYEKHKVYACE |
| | ASGWVYWGQGTL | NYKTTPPVLDSDGSFFLYSKLTVDKSRWQQGNVE | EDFATYYCQQ | VTHQGLSSPVT |
| | VTVSS (SEQ | SCSVMHEALHNHYTQKSLSLSPG (SEQ ID | SYSTPPTFGP | KSENRGEC |
| | ID NO: 1478) | NO: 44) | GTKVDIK | (SEQ ID NO: |
| | | | (SEQ ID | 45) |
| | | | NO: 1449) | |
| PMAB2 | EVQLVQSGAEVK | ASTKGPSVFPLAPSSKSTSGGTAALGCLVKDYFP | DIQMTQSPSS | RTVAAPSVFIF |
| 76 | KPGASVKVSCKA | EPVTVSWNSGALTSGVHTFPAVLQSSGLYSLSSV | LSASVGDRVT | PPSDEQLKSGT |
| | SGYSFTTYYMHW | VTVPSSSLGTQTYICNVNHKPSNTKVDKKVEPKS | ITCQASRDIK | ASVVCLLNNFY |
| | VRQAPGQGLEWM | CDKTHTCPPCPAPEAAGAPSVFLFPPKPKDTLMI | NYLAWYQQKP | PREAKVQWKVD |
| | GIINPSGGSTSY | SRTPEVTCVVVDVSHEDPEVKENWYVDGVEVHNA | GKAPKLLIYA | NALQSGNSQES |
| | AQKFQGRVTMTR | KTKPREEQYNSTYRVVSVLTVLHQDWLNGKEYKC | ASSLQSGVPS | VTEQDSKDSTY |
| | DTSTSTVYMELS | KVSNKALPAPIEKTISKAKGQPREPQVYTLPPSR | RFSGSGSGTD | SLSSTLTLSKA |
| | SLRSEDTAVYYC | EEMTKNQVSLTCLVKGFYPSDIAVEWESNGQPEN | FTLTISSLQP | DYEKHKVYACE |
| | ASGWVYWGQGTL | NYKTTPPVLDSDGSFFLYSKLTVDKSRWQQGNVF | EDFATYYCQQ | VTHQGLSSPVT |
| | VTVSS (SEQ | SCSVMHEALHNHYTQKSLSLSPG (SEQ ID | SYSTPPTFGP | KSENRGEC |
| | ID NO: 1708) | NO: 44) | GTKVDIK | (SEQ ID NO: |
| | | | (SEQ ID | 45) |
| | | | NO: 1449) | |
| PMAB2 | EVQLVQSGAEVK | ASTKGPSVFPLAPSSKSTSGGTAALGCLVKDYFP | DIQMTQSPSS | RTVAAPSVFIF |
| 77 | KPGASVKVSCKA | EPVTVSWNSGALTSGVHTFPAVLQSSGLYSLSSV | LSASVGDRVT | PPSDEQLKSGT |
| | SGYTFTTYYMHW | VTVPSSSLGTQTYICNVNHKPSNTKVDKKVEPKS | ITCRASQSIS | ASVVCLLNNFY |
| | VRQAPGQGLEWM | CDKTHTCPPCPAPEAAGAPSVFLFPPKPKDTLMI | SYLAWYQQKP | PREAKVQWKVD |
| | GIINPSGGSTSY | SRTPEVTCVVVDVSHEDPEVKENWYVDGVEVHNA | GKAPKLLIYA | NALQSGNSQES |
| | AQKFQGRVTMTR | KTKPREEQYNSTYRVVSVLTVLHQDWLNGKEYKC | ASSLQSGVPS | VTEQDSKDSTY |
| | DTSTSTVYMELS | KVSNKALPAPIEKTISKAKGQPREPQVYTLPPSR | RFSGSGSGTD | SLSSTLTLSKA |
| | SLRSEDTAVYYC | EEMTKNQVSLTCLVKGFYPSDIAVEWESNGQPEN | FTLTISSLQP | DYEKHKVYACE |
| | ASGWVYWGQGTL | NYKTTPPVLDSDGSFFLYSKLTVDKSRWQQGNVE | EDFATYYCQQ | VTHQGLSSPVT |
| | VTVSS (SEQ | SCSVMHEALHNHYTQKSLSLSPG (SEQ ID | SYSTPPTFGP | KSENRGEC |
| | ID NO: 1707) | NO: 44) | GTKVDIK | (SEQ ID NO: |
| | | | (SEQ ID | 45) |
| | | | NO: 1479) | |
| PMAB2 | EVQLVQSGAEVK | ASTKGPSVFPLAPSSKSTSGGTAALGCLVKDYFP | DIQMTQSPSS | RTVAAPSVFIF |
| 78 | KPGASVKVSCKA | EPVTVSWNSGALTSGVHTFPAVLQSSGLYSLSSV | LSASVGDRVT | PPSDEQLKSGT |
| | SGYSFTSYYMHW | VTVPSSSLGTQTYICNVNHKPSNTKVDKKVEPKS | ITCRASQSIS | ASVVCLLNNFY |
| | VRQAPGQGLEWM | CDKTHTCPPCPAPEAAGAPSVFLFPPKPKDTLMI | SYLAWYQQKP | PREAKVQWKVD |
| | GIINPSGGSTSY | SRTPEVTCVVVDVSHEDPEVKENWYVDGVEVHNA | GKAPKLLIYA | NALQSGNSQES |
| | AQKFQGRVTMTR | KTKPREEQYNSTYRVVSVLTVLHQDWLNGKEYKC | ASSLQSGVPS | VTEQDSKDSTY |
| | DTSTSTVYMELS | KVSNKALPAPIEKTISKAKGQPREPQVYTLPPSR | RFSGSGSGTD | SLSSTLTLSKA |
| | SLRSEDTAVYYC | EEMTKNQVSLTCLVKGFYPSDIAVEWESNGQPEN | FTLTISSLQP | DYEKHKVYACE |
| | ASGWVYWGQGTL | NYKTTPPVLDSDGSFFLYSKLTVDKSRWQQGNVE | EDFATYYCQQ | VTHQGLSSPVT |
| | VTVSS (SEQ | SCSVMHEALHNHYTQKSLSLSPG (SEQ ID | SYSTPPTFGP | KSENRGEC |
| | ID NO: 1478) | NO: 44) | GTKVDIK | (SEQ ID NO: |
| | | | (SEQ ID | 45) |
| | | | NO: 1479) | |

[0411] As provided for herein, in some embodiments, a polypeptide comprises a plurality of chain 1 and chain 2 as provided for in the table above. In some embodiments, the polypeptide comprises two identical polypeptides of chain 1 and two identical polypeptides of chain 2. In some embodiments, the two polypeptides of chain 1 are different. In some embodiments, the polypeptides of chain 2 are different. The domains of the scFv antibody can also be linked with a disulfide bond. Without being bound to any particular theory, the disulfide linkage can be used to stabilize the scFv antibody. As provided for herein, in some embodiments, the scFv antibody is an antibody that binds to MAdCAM.

[0412] In some embodiments, the therapeutic compound comprises one or more sequences, or a combination thereof, selected from the Table 16.

[0413] In some embodiments, a PD-1 antibody or the PD-1 antibody of a PD-1-MAdCAM antibody, such as when the PD-1 antibody is in the FAb format, comprises CDRs as provided for in Table 13.

TABLE 13

| | CDR | | | | | | |
|---|---|---|---|---|---|---|---|
| | Annotation | | | | | | |
| Clone | System | HCDR1 | HCDR2 | HCDR3 | LCDR1 | LCDR2 | LCDR3 |
| PMAB61 | Kabat | SYYMH | IINPSGGST | ASGWVY | RASQSISSY | AASSLQS | QQSYSTP |
| | | (SEQ ID | SYAQKFQG | (SEQ | LA (SEQ | (SEQ ID | PT (SEQ |
| | | NO: | (SEQ ID | ID NO: | ID NO: | NO: | ID NO: |
| | | 1709) | NO: 1712) | 1715) | 1716) | 1717) | 1718) |
| | IMGT | GYSFTSYY | INPSGGST | ASGWVY | QSISSY | AAS | QQSYSTP |
| | | (SEQ ID | (SEQ ID | (SEQ | (SEQ ID | | PT (SEQ |
| | | NO: | NO: 1713) | ID NO: | NO: 1730) | | ID NO: |
| | | 1710) | | 1715) | | | 1718) |
| | CHOTHIA | GYSFTSY | NPSGGS | WV | RASQSISSY | AASSLQS | QQSYSTP |
| | | (SEQ ID | (SEQ ID | | LA (SEQ | (SEQ ID | PT (SEQ |
| | | NO: | NO: 1714) | | ID NO: | NO: | ID NO: |
| | | 1711) | | | 1716) | 1717) | 1718) |
| PMAB65 | Kabat | SYDMS | GITISGGST | ARGRGG | KSSQSVLYS | WASTRES | QQYYTTP |
| | | (SEQ ID | YYADSVKG | SGWLDY | PNNKNYLA | (SEQ ID | PT (SEQ |
| | | NO: | (SEQ ID | (SEQ | (SEQ ID | NO: | ID NO: |
| | | 1719) | NO: 1744) | ID NO: | NO: 1726) | 1728) | 1729) |
| | | | | 1724) | | | |
| | IMGT | GFTFSSYD | ITISGGS | ARGRGG | QSVLYS PNN | WAS | QQYYTTP |
| | | (SEQ ID | (SEQ ID | SGWLDY | KNY (SEQ | | PT (SEQ |
| | | NO: | NO: 1722) | (SEQ | ID NO: | | ID NO: |
| | | 1720) | | ID NO: | 1727) | | 1729) |
| | | | | 1724) | | | |
| | CHOTHIA | GFTESSY | TISGGS | RGGSGW | KSSQSVLYS | WASTRES | QQYYTTP |
| | | (SEQ ID | (SEQ ID | LD | PNNKNYLA | (SEQ ID | PT (SEQ |
| | | NO: | NO: 1723) | (SEQ | (SEQ ID | NO: | ID NO: |
| | | 1721) | | ID NO: | NO: 1726) | 1728) | 1729) |
| | | | | 1725) | | | |
| PMAB62 | Kabat | SYYMH | IINPSGGST | ASGWVY | RASQSISSY | AASSLQS | QQSYSTP |
| | | (SEQ ID | SYAQKFQG | (SEQ | LA (SEQ | (SEQ ID | PT (SEQ |
| | | NO: | (SEQ ID | ID NO: | ID NO: | NO: | ID NO: |
| | | 1709) | NO: 1712) | 1715) | 1716) | 1717) | 1718) |
| | IMGT | GYSFTSYY | INPSGGST | ASGWVY | QSISSY | AAS | QQSYSTP |
| | | (SEQ ID | (SEQ ID | (SEQ | (SEQ ID | | PT (SEQ |
| | | NO: | NO: 1713) | ID NO: | NO: 1730) | | ID NO: |
| | | 1710) | | 1715) | | | 1718) |
| | CHOTHIA | GYSFTSY | NPSGGS | WV | RASQSISSY | AASSLQS | QQSYSTP |
| | | (SEQ ID | (SEQ ID | | LA (SEQ | (SEQ ID | PT (SEQ |
| | | NO: | NO: 1714) | | ID NO: | NO: | ID NO: |
| | | 1711) | | | 1716) | 1717) | 1718) |
| PMAB66 | Kabat | SYDMS | GITISGGST | ARGRGG | KSSQSVLYS | WASTRES | QQYYTTP |
| | | (SEQ ID | YYADSVKG | SGWLDY | PNNKNYLA | (SEQ ID | PT (SEQ |
| | | NO: | (SEQ ID | (SEQ | (SEQ ID | NO: | ID NO: |
| | | 1719) | NO: 1744) | ID NO: | NO: 1726) | 1728) | 1729) |
| | | | | 1724) | | | |
| | IMGT | GFTFSSYD | ITISGGS | ARGRGG | QSVLYSPNN | WAS | QQYYTTP |
| | | (SEQ ID | (SEQ ID | SGWLDY | KNY (SEQ | | PT (SEQ |
| | | NO: | NO: 1722) | (SEQ | ID NO: | | ID NO: |
| | | 1720) | | ID NO: | 1727) | | 1729) |
| | | | | 1724) | | | |
| | CHOTHIA | GFTESSY | TISGGS | RGGSGW | KSSQSVLYS | WASTRES | QQYYTTP |
| | | (SEQ ID | (SEQ ID | LD | PNNKNYLA | (SEQ ID | PT (SEQ |
| | | NO: | NO: 1723) | (SEQ | (SEQ ID | NO: | ID NO: |
| | | 1721) | | ID NO: | NO: 1726) | 1728) | 1729) |
| | | | | 1725) | | | |
| PMAB63 | Kabat | SYYMH | IINPSGGST | ASGWVY | RASQSISSY | AASSLQS | QQSYSTP |
| | | (SEQ ID | SYAQKFQG | (SEQ | LA (SEQ | (SEQ ID | PT (SEQ |
| | | NO: | (SEQ ID | ID NO: | ID NO: | NO: | ID NO: |
| | | 1709) | NO: 1712) | 1715) | 1716) | 1717) | 1718) |
| | IMGT | GYSFTSYY | INPSGGST | ASGWVY | QSISSY | AAS | QQSYSTP |
| | | (SEQ ID | (SEQ ID | (SEQ | (SEQ ID | | PT (SEQ |
| | | NO: | NO: 1713) | ID NO: | NO: 1730) | | ID NO: |
| | | 1710) | | 1715) | | | 1718) |
| | CHOTHIA | GYSFTSY | NPSGGS | WV | RASQSISSY | AASSLQS | QQSYSTP |
| | | (SEQ ID | (SEQ ID | | LA (SEQ | (SEQ ID | PT (SEQ |
| | | NO: | NO: 1714) | | ID NO: | NO: | ID NO: |
| | | 1711) | | | 1716) | 1717) | 1718) |
| PMAB67 | Kabat | SYDMS | GITISGGST | ARGRGG | KSSQSVLYS | WASTRES | QQYYTTP |
| | | (SEQ ID | YYADSVKG | SGWLDY | PNNKNYLA | (SEQ ID | PT (SEQ |
| | | NO: | (SEQ ID | (SEQ | (SEQ ID | NO: | ID NO: |
| | | 1719) | NO: 1744) | ID NO: | NO: 1726) | 1728) | 1729) |
| | | | | 1724) | | | |
| | IMGT | GFTFSSYD | ITISGGS | ARGRGG | QSVLYSPNN | WAS | QQYYTTP |
| | | (SEQ ID | (SEQ ID | SGWLDY | KNY (SEQ | | PT (SEQ |
| | | NO: | NO: 1722) | (SEQ | ID NO: | | ID NO: |
| | | 1720) | | ID NO: | 1727) | | 1729) |
| | | | | 1724) | | | |
| | CHOTHIA | GFTFSSY | TISGGS | RGGSGW | KSSQSVLYS | WASTRES | QQYYTTP |
| | | (SEQ ID | (SEQ ID | LD | PNNKNYLA | (SEQ ID | PT (SEQ |
| | | NO: | NO: 1723) | (SEQ | (SEQ ID | NO: | ID NO: |
| | | 1721) | | ID NO: | NO: 1726) | 1728) | 1729) |
| | | | | 1725) | | | |
| PMAB64 | Kabat | SYYMH | IINPSGGST | ASGWVY | RASQSISSY | AASSLQS | QQSYSTP |
| | | (SEQ ID | SYAQKFQG | (SEQ | LA (SEQ | (SEQ ID | PT (SEQ |
| | | NO: | (SEQ ID | ID NO: | ID NO: | NO: | ID NO: |
| | | 1709) | NO: 1712) | 1715) | 1716) | 1717) | 1718) |
| | IMGT | GYSFTSYY | INPSGGST | ASGWVY | QSISSY | AAS | QQSYSTP |
| | | (SEQ ID | (SEQ ID | (SEQ | (SEQ ID | | PT (SEQ |
| | | NO: | NO: 1713) | ID NO: | NO: 1730) | | ID NO: |
| | | 1710) | | 1715) | | | 1718) |
| | CHOTHIA | GYSFTSY | NPSGGS | WV | RASQSISSY | AASSLQS | QQSYSTP |
| | | (SEQ ID | (SEQ ID | | LA (SEQ | (SEQ ID | PT (SEQ |
| | | NO: | NO: 1714) | | ID NO: | NO: | ID NO: |
| | | 1711) | | | 1716) | 1717) | 1718) |
| PMAB68 | Kabat | SYDMS | GITISGGST | ARGRGG | KSSQSVLYS | WASTRES | QQYYTTP |
| | | (SEQ ID | YYADSVKG | SGWLDY | PNNKNYLA | (SEQ ID | PT (SEQ |
| | | NO: | (SEQ ID | (SEQ | (SEQ ID | NO: | ID NO: |
| | | 1719) | NO: 1744) | ID NO: | NO: 1726) | 1728) | 1729) |
| | | | | 1724) | | | |
| | IMGT | GFTFSSYD | ITISGGS | ARGRGG | QSVLYSPNN | WAS | QQYYTTP |
| | | (SEQ ID | (SEQ ID | SGWLDY | KNY (SEQ | | PT (SEQ |
| | | NO: | NO: 1722) | (SEQ | ID NO: | | ID NO: |
| | | 1720) | | ID NO: | 1727) | | 1729) |
| | | | | 1724) | | | |
| | CHOTHIA | GFTESSY | TISGGS | RGGSGW | KSSQSVLYS | WASTRES | QQYYTTP |
| | | (SEQ ID | (SEQ ID | LD | PNNKNYLA | (SEQ ID | PT (SEQ |
| | | NO: | NO: 1723) | (SEQ | (SEQ ID | NO: | ID NO: |
| | | 1721) | | ID NO: | NO: 1726) | 1728) | 1729) |
| | | | | 1725) | | | |

[0414] In some embodiments, the therapeutic compound comprises CDRs of one or more sequences, or a combination thereof, selected from the Table 13.

[0415] In some embodiments, the PD-1-MAdCAM antibody comprises scFv CDRs, when the scFV binds to MAdCAM, as provided for in table 14.

TABLE 14

| | CDR | | | | | | |
|---|---|---|---|---|---|---|---|
| | Annotation | | | | | | |
| Clone | System | HCDR1 | HCDR2 | HCDR3 | LCDR1 | LCDR2 | LCDR3 |
| PMAB61 | Kabat | GFTFSSYW | ISGSGGYT | ARDRPY | RASQSISSS | AASSLQS | QQYKSYP |
| | | (SEQ ID | (SEQ ID | YYDMDV | LA (SEQ | (SEQ ID | VT (SEQ |
| | | NO: | NO: 1732) | (SEQ | ID NO: | NO: | ID NO: |
| | | 1731) | | ID NO: | 1736) | 1717) | 1738) |
| | | | | 1734) | | | |
| | IMGT | GFTESSY | SGSGGY | DRPYYY | QSISSS | AAS | QQYKSYP |
| | | (SEQ ID | (SEQ ID | DMDV | (SEQ ID | | VT (SEQ |
| | | NO: | NO: 1733) | (SEQ | NO: 1737) | | ID NO: |
| | | 1721) | | ID NO: | | | 1738) |
| | | | | 1735) | | | |
| | CHOTHIA | GFTESSY | SGSGGY | DRPYYY | RASQSISSS | AASSLQS | QQYKSYP |
| | | (SEQ ID | (SEQ ID | DMDV | LA (SEQ | (SEQ ID | VT (SEQ |
| | | NO: | NO: 1733) | (SEQ | ID NO: | NO: | ID NO: |
| | | 1721) | | ID NO: | 1736) | 1717) | 1738) |
| | | | | 1735) | | | |
| PMAB65 | Kabat | GFTESSYW | ISGSGGYT | ARDRPY | RASQSISSS | AASSLQS | QQYKSYP |
| | | (SEQ ID | (SEQ ID | YYDMDV | LA (SEQ | (SEQ ID | VT (SEQ |
| | | NO: | NO: 1732) | (SEQ | ID NO: | NO: | ID NO: |
| | | 1731) | | ID NO: | 1736) | 1717) | 1738) |
| | | | | 1734) | | | |
| | IMGT | GFTESSY | SGSGGY | DRPYYY | QSISSS | AAS | QQYKSYP |
| | | (SEQ ID | (SEQ ID | DMDV | (SEQ ID | | VT (SEQ |
| | | | NO: 1733) | (SEQ | NO: 1737) | | |
| | | NO: | | ID NO: | | | ID NO: |
| | | 1721) | | 1735) | | | 1738) |
| | CHOTHIA | GFTESSY | SGSGGY | DRPYYY | RASQSISSS | AASSLQS | QQYKSYP |
| | | (SEQ ID | (SEQ ID | DMDV | LA (SEQ | (SEQ ID | VT (SEQ |
| | | NO: | NO: 1733) | (SEQ | ID NO: | NO: | ID NO: |
| | | 1721) | | ID NO: | 1736) | 1717) | 1738) |
| | | | | 1735) | | | |
| PMAB62 | Kabat | GFTFSSYW | ISGSGGYT | ARDRPY | RASQSISSS | AASSLQS | QQYKSYP |
| | | (SEQ ID | (SEQ ID | YYDLDV | LA (SEQ | (SEQ ID | VT (SEQ |
| | | NO: | NO: 1732) | (SEQ | ID NO: | NO: | ID NO: |
| | | 1731) | | ID NO: | 1736) | 1717) | 1738) |
| | | | | 1739) | | | |
| | IMGT | GFTESSY | SGSGGY | DRPYYY | QSISSS | AAS | QQYKSYP |
| | | (SEQ ID | (SEQ ID | DLDV | (SEQ ID | | VT (SEQ |
| | | NO: | NO: 1733) | (SEQ | NO: 1737) | | ID NO: |
| | | 1721) | | ID NO: | | | 1738) |
| | | | | 1740) | | | |
| | CHOTHIA | GFTESSY | SGSGGY | DRPYYY | RASQSISSS | AASSLQS | QQYKSYP |
| | | (SEQ ID | (SEQ ID | DLDV | LA (SEQ | (SEQ ID | VT (SEQ |
| | | NO: | NO: 1733) | (SEQ | ID NO: | NO: | ID NO: |
| | | 1721) | | ID NO: | 1736) | 1717) | 1738) |
| | | | | 1740) | | | |
| PMAB66 | Kabat | GFTESSYW | ISGSGGYT | ARDRPY | RASQSISSS | AASSLQS | QQYKSYP |
| | | (SEQ ID | (SEQ ID | YYDLDV | LA (SEQ | (SEQ ID | VT (SEQ |
| | | NO: | NO: 1732) | (SEQ | D NO: | NO: | ID NO: |
| | | 1731) | | ID NO: | 1736) | 1717) | 1738) |
| | | | | 1739) | | | |
| | IMGT | GFTESSY | SGSGGY | DRPYYY | QSISSS | AAS | QQYKSYP |
| | | (SEQ ID | (SEQ ID | DLDV | (SEQ ID | | VT (SEQ |
| | | NO: | NO: 1733) | (SEQ | NO: 1737) | | ID NO: |
| | | 1721) | | ID NO: | | | 1738) |
| | | | | 1740) | | | |
| | CHOTHIA | GFTESSY | SGSGGY | DRPYYY | RASQSISSS | AASSLQS | QQYKSYP |
| | | (SEQ ID | (SEQ ID | DLDV | LA (SEQ | (SEQ ID | VT (SEQ |
| | | NO: | NO: 1733) | (SEQ | ID NO: | NO: | ID NO: |
| | | 1721) | | ID NO: | 1736) | 1717) | 1738) |
| | | | | 1740) | | | |
| PMAB63 | Kabat | GFTFSSYW | ISGSGGYT | ARDRPY | RASQSISSS | AASSLQS | QQYKSYP |
| | | (SEQ ID | (SEQ ID | YYDLDV | LA (SEQ | (SEQ ID | VT (SEQ |
| | | NO: | NO: 1732) | (SEQ | ID NO: | NO: | ID NO: |
| | | 1731) | | ID NO: | 1736) | 1717) | 1738) |
| | | | | 1739) | | | |
| | IMGT | GFTESSY | SGSGGY | DRPYYY | QSISSS | AAS | QQYKSYP |
| | | (SEQ ID | (SEQ ID | DLDV | (SEQ ID | | VT (SEQ |
| | | NO: | NO: 1733) | (SEQ | NO: 1737) | | ID NO: |
| | | 1721) | | ID NO: | | | 1738) |
| | | | | 1740) | | | |
| | CHOTHIA | GFTESSY | SGSGGY | DRPYYY | RASQSISSS | AASSLQS | QQYKSYP |
| | | (SEQ ID | (SEQ ID | DLDV | LA (SEQ | (SEQ ID | VT (SEQ |
| | | NO: | NO: 1733) | (SEQ | ID NO: | NO: | ID NO: |
| | | 1721) | | ID NO: | 1736) | 1717) | 1738) |
| | | | | 1740) | | | |
| PMAB67 | Kabat | GFTESSYW | ISGSGGYT | ARDRPY | RASQSISSS | AASSLQS | QQYKSYP |
| | | SEQ ID | (SEQ ID | YYDLDV | LA (SEQ | (SEQ ID | VT (SEQ |
| | | NO: | NO: 1732) | (SEQ | ID NO: | NO: | ID NO: |
| | | 1731) | | ID NO: | 1736) | 1717) | 1738) |
| | | | | 1739) | | | |
| | IMGT | GFTESSY | SGSGGY | DRPYYY | QSISSS | AAS | QQYKSYP |
| | | (SEQ ID | (SEQ ID | DLDV | (SEQ ID | | VT (SEQ |
| | | NO: | NO: 1733) | (SEQ | NO: 1737) | | ID NO: |
| | | 1721) | | ID NO: | | | 1738) |
| | | | | 1740) | | | |
| | CHOTHIA | GFTESSY | SGSGGY | DRPYYY | RASQSISSS | AASSLQS | QQYKSYP |
| | | (SEQ ID | (SEQ ID | DLDV | LA (SEQ | (SEQ ID | VT (SEQ |
| | | NO: | NO: 1733) | (SEQ | ID NO: | NO: | ID NO: |
| | | 1721) | | ID NO: | 1736) | 1717) | 1738) |
| | | | | 1740) | | | |
| PMAB64 | Kabat | GFTFSSYW | ISGSGGYT | ARDRPY | RASQSISSS | AASSLQS | QQYKSYP |
| | | (SEQ ID | (SEQ ID | YYDMDV | LA (SEQ | (SEQ ID | VT (SEQ |
| | | NO: | NO: 1732) | SEQ | ID NO: | NO: | ID NO: |
| | | 1731) | | ID NO: | 1736) | 1717) | 1738) |
| | | | | 1734) | | | |
| | IMGT | GFTESSY | SGSGGY | DRPYYY | QSISSS | AAS | QQYKSYP |
| | | (SEQ ID | (SEQ ID | DMDV | (SEQ ID | | VT (SEQ |
| | | NO: | NO: 1733) | SEQ | NO: 1737) | | ID NO: |
| | | 1721) | | ID NO: | | | 1738) |
| | | | | 1735) | | | |
| | CHOTHIA | GFTESSY | SGSGGY | DRPYYY | RASQSISSS | AASSLQS | QQYKSYP |
| | | (SEQ ID | (SEQ ID | DMDV | LA (SEQ | (SEQ ID | VT (SEQ |
| | | NO : | NO: 1733) | (SEQ | ID NO: | NO: | ID NO: |
| | | 1721) | | ID NO: | 1736) | 1717) | 1738) |
| | | | | 1735) | | | |
| PMAB68 | Kabat | GFTESSYW | ISGSGGYT | ARDRPY | RASQSISSS | AASSLQS | QQYKSYP |
| | | (SEQ ID | (SEQ ID | YYDMDV | LA (SEQ | (SEQ ID | VT (SEQ |
| | | NO: | NO: 1732) | (SEQ | ID NO: | NO: | ID NO: |
| | | 1731) | | ID NO: | 1736) | 1717) | 1738) |
| | | | | 1734) | | | |
| | IMGT | GFTESSY | SGSGGY | DRPYYY | QSISSS | AAS | QQYKSYP |
| | | ( SEQ ID | (SEQ ID | DMDV | (SEQ ID | | VT (SEQ |
| | | NO: | NO: 1733) | (SEQ | NO: 1737) | | ID NO: |
| | | 1721) | | ID NO: | | | 1738) |
| | | | | 1735) | | | |
| | CHOTHIA | GFTESSY | SGSGGY | DRPYYY | RASQSISSS | AASSLQS | QQYKSYP |
| | | (SEQ ID | (SEQ ID | DMDV | LA (SEQ | (SEQ ID | VT (SEQ |
| | | NO: | NO: 1733) | SEQ | ID NO: | NO: | ID NO: |
| | | 1721) | | ID NO: | 1736) | 1717) | 1738) |
| | | | | 1735) | | | |

[0416] In some embodiments, the therapeutic compound comprises CDRs one or more sequences, or a combination thereof, selected from the Table 14.

[0417] In some embodiments, the therapeutic is a Fab PD-1 antibody fused via a linker to a scFv MAdCAM antibody. In some embodiments, the Fab PD-1 antibody is fused to a IgG1 constant domain, wherein said IgG1 constant domain is fused to scFv MAdCAM antibody via a Fc-scFv linker. In some embodiment the scFv MAdCAM antibody comprises an internal scFv linker. In some embodiments, the linker is a peptide linker. In some embodiments, the peptide linker is a glycine/serine linker as provided herein.

[0418] In some embodiments, the PD-1-MAdCAM antibody comprises one or more sequences as shown in Table 12. In some embodiments, the MAdCAM antibody comprises a combination of one or more sequence as shown in Table 12. In some embodiments, the anti-PD-1 antibody is in the Fab format and the anti-MAdCAM antibody is in a scFV format as illustrated in Table 12. In some embodiments, the Fab portion of the antibody comprises a CDR1 from any one of clones of Table 13, a CDR2 from any one of clones of Table 13, and a CDR3 from any one of clones of Table 13. In some embodiments, the Fab portion of the antibody comprises a LCDR1 from any one of clones of Table 13, a LCDR2 from any one of clones of Table 13, and a LCDR3 from any one of clones of Table 13. In some embodiments, the scFv portion of the antibody comprises a CDR1 from any one of clones of Table 14, a CDR2 from any one of clones of Table 14, and a CDR3 from any one of clones of Table 14. In some embodiments, the scFc portion of the antibody comprises a LCDR1 from any one of clones of Table 14, a LCDR2 from any one of clones of Table 14, and a LCDR3 from any one of clones of Table 14. In some embodiments, the amino acid residues of the CDRs shown above contain mutations. In some embodiments, the CDRs contain 1, 2, 3, 4, 5, 6, 7, 8, 9, or 10 substitutions or mutations. In some embodiments, the substitution is a conservative substitution.

[0419] In some embodiments, the PD-1-MAdCAM antibody has a VH region selected from any one of clones PMAB61-231 of Table 12 and a VL region selected from any one of clones PMAB61-231 as set forth in of Table 12. In some embodiments, the antibody comprises a Fab CDR1 from any one of clones of Table 13, a Fab CDR2 from any one of clones of Table 13, and a Fab CDR3 from any one of clones of Table 13, a scFv CDR1 from any one of clones of Table 14, a Fab CDR2 from any one of clones of Table 14, and a Fab CDR3 from any one of clones of Table 14.

[0420] In some embodiments, the variable heavy chain has a Fab HCDR1, HCDR2, and a HCDR3 as set forth for PMAB61 in Table 13. In some embodiments, the variable heavy chain has a Fab HCDR1, HCDR2, and a HCDR3 as set forth for PMAB62 in Table 13. In some embodiments, the variable heavy chain has a Fab HCDR1, HCDR2, and a HCDR3 as set forth for PMAB63 in Table 13. In some embodiments, the variable heavy chain has a Fab HCDR1, HCDR2, and a HCDR3 as set forth for PMAB64 in Table 13. In some embodiments, the variable heavy chain has a Fab HCDR1, HCDR2, and a HCDR3 as set forth for PMAB65 in Table 13. In some embodiments, the variable heavy chain has a Fab HCDR1, HCDR2, and a HCDR3 as set forth for PMAB66 in Table 13. In some embodiments, the variable heavy chain has a Fab HCDR1, HCDR2, and a HCDR3 as set forth for PMAB67 in Table 13. In some embodiments, the variable heavy chain has a Fab HCDR1, HCDR2, and a HCDR3 as set forth for PMAB68 in Table 13.

[0421] In some embodiments, the variable light chain has a Fab LCDR1, LCDR2, and a LCDR3 as set forth for PMAB61 in Table 13. In some embodiments, the variable light chain has a Fab LCDR1, LCDR2, and a LCDR3 as set forth for PMAB62 in Table 13. In some embodiments, the variable light chain has a Fab LCDR1, LCDR2, and a LCDR3 as set forth for PMAB63 in Table 13. In some embodiments, the variable light chain has a Fab LCDR1, LCDR2, and a LCDR3 as set forth for PMAB64 in Table 13. In some embodiments, the variable light chain has a Fab LCDR1, LCDR2, and a LCDR3 as set forth for PMAB65 in Table 13. In some embodiments, the variable light chain has a Fab LCDR1, LCDR2, and a LCDR3 as set forth for PMAB67 in Table 13. In some embodiments, the variable light chain has a Fab LCDR1, LCDR2, and a LCDR3 as set forth for PMAB66 in Table 13. In some embodiments, the variable light chain has a Fab LCDR1, LCDR2, and a LCDR3 as set forth for PMAB68 in Table 13.

[0422] In some embodiments, the variable heavy chain has a scFv HCDR1, HCDR2, and a HCDR3 as set forth for PMAB61 in Table 14. In some embodiments, the variable heavy chain has a scFv HCDR1, HCDR2, and a HCDR3 as set forth for PMAB62 in Table 14. In some embodiments, the variable heavy chain has a scFv HCDR1, HCDR2, and a HCDR3 as set forth for PMAB63 in Table 14. In some embodiments, the variable heavy chain has a scFv HCDR1, HCDR2, and a HCDR3 as set forth for PMAB64 in Table 14. In some embodiments, the variable heavy chain has a scFv HCDR1, HCDR2, and a HCDR3 as set forth for PMAB65 in Table 14. In some embodiments, the variable heavy chain has a scFv HCDR1, HCDR2, and a HCDR3 as set forth for PMAB66 in Table 14. In some embodiments, the variable heavy chain has a scFv HCDR1, HCDR2, and a HCDR3 as set forth for PMAB67 in Table 14. In some embodiments, the variable heavy chain has a scFv HCDR1, HCDR2, and a HCDR3 as set forth for PMAB68 in Table 14.

[0423] In some embodiments, the variable light chain has a scFv LCDR1, LCDR2, and a LCDR3 as set forth for PMAB61 in Table 14. In some embodiments, the variable light chain has a scFv LCDR1, LCDR2, and a LCDR3 as set forth for PMAB62 in Table 14. In some embodiments, the variable light chain has a scFv LCDR1, LCDR2, and a LCDR3 as set forth for PMAB63 in Table 14. In some embodiments, the variable light chain has a scFv LCDR1, LCDR2, and a LCDR3 as set forth for PMAB64 in Table 14. In some embodiments, the variable light chain has a scFv LCDR1, LCDR2, and a LCDR3 as set forth for PMAB65 in Table 14. In some embodiments, the variable light chain has a scFv LCDR1, LCDR2, and a LCDR3 as set forth for PMAB66 in Table 14. In some embodiments, the variable light chain has a scFv LCDR1, LCDR2, and a LCDR3 as set forth for PMAB67 in Table 14. In some embodiments, the variable light chain has a scFv LCDR1, LCDR2, and a LCDR3 as set forth for PMAB68 in Table 14.

[0424] In some embodiments, the CDRS are swapped for one another. For example, the Fab HCDR1 of clone PMAB61 can be substituted for the Fab HCDR1 of clone PMAB62, or vice versa. This CDR swapping can be done for any of the Fab HCDRs of the clones provided herein (e.g., HCDR1 for HCDR1; HCDR2 for HCDR2; or HCDR3 for HCDR3) or the Fab LCDRs (e.g., LCDR1 for LCDR1; LCDR2 for LCDR2; or LCDR3 for LCDR3). Furthermore, the CDR swapping can be done for any of the scFv HCDRs of the clones provided herein (e.g., HCDR1 for HCDR1; HCDR2 for HCDR2; or HCDR3 for HCDR3) or the scFv LCDRs (e.g., LCDR1 for LCDR1; LCDR2 for LCDR2; or LCDR3 for LCDR3). Therefore, in some embodiments, the antibody comprises a Fab HCDR1 as set forth in any of clones of Table 13, a HCDR2 as set forth in any of clones of Table 13, a HCDR3 as set forth in any of clones of Table 13, a LCDR1 as set forth in any of clones of Table 13, a LCDR2 as set forth in any of clones of Table 13, a LCDR3 as set forth in any of clones of Table 13, or a variant of any of the foregoing. In some embodiments, the antibody comprises a scFv HCDR1 as set forth in any of clones of Table 14, a HCDR2 as set forth in any of clones of Table 14, a HCDR3 as set forth in any of clones of Table 14, a LCDR1 as set forth in any of clones of Table 14, a LCDR2 as set forth in any of clones of Table 14, a LCDR3 as set forth in any of clones of Table 14, or a variant of any of the foregoing.

[0425] In some embodiments, an antibody, or antigen binding fragment thereof, comprises a heavy chain variable region comprising a variable heavy CDR1 (HCDR1) having at least one amino acid substitution relative to SEQ ID NO: 1709, or 1719; a variable heavy CDR2 (HCDR2) having at least one amino acid substitution relative to SEQ ID NO: 1712, or 1744; and variable heavy CDR3 (HCDR3) having at least one amino acid substitution relative to SEQ ID NO: 1715, or 1724; and a light chain variable region comprises a variable light CDR1 (LCDR1) having at least one amino acid substitution relative to SEQ ID NO: 1716, or 1726; a variable light CDR2 (LCDR2) having at least one amino acid substitution relative to SEQ ID NO: 1717, or 1728; and a variable light CDR3 (LCDR3) having at least one amino acid substitution relative to SEQ ID NO: 1718, or 1729.

[0426] In some embodiments, the heavy chain variable region comprises a HCDR1 comprising the amino acid sequence of SEQ ID NO: 1719, a HCDR2 comprising the amino acid sequence of SEQ ID NO: 1744, and a HCDR3 comprising the amino acid sequence of SEQ ID NO: 1724.

[0427] In some embodiments, the heavy chain variable region comprises a HCDR1 comprising the amino acid sequence of SEQ ID NO: 1709, a HCDR2 comprising the amino acid sequence of SEQ ID NO: 1712, and a HCDR3 comprising the amino acid sequence of SEQ ID NO: 1715.

[0428] In some embodiments, the light chain variable region comprises a LCDR1 comprising the amino acid sequence of SEQ ID NO: 1726, a LCDR2 comprising the amino acid sequence of SEQ ID NO: 1728, and a LCDR3 comprising the amino acid sequence of SEQ ID NO: 1729.

[0429] In some embodiments, the light chain variable region comprises a LCDR1 comprising the amino acid sequence of SEQ ID NO: 1716, a LCDR2 comprising the amino acid sequence of SEQ ID NO: 1717, and a LCDR3 comprising the amino acid sequence of SEQ ID NO: 1718.

[0430] In some embodiments, the antibody, or antigen binding fragment thereof, comprises the heavy chain variable region comprises a variable heavy CDR1 (HCDR1) having an amino acid sequence of SEQ ID NO: 1719; a variable heavy CDR2 (HCDR2) having an amino acid sequence of SEQ ID NO: 1744; and variable heavy CDR3 (HCDR3) having an amino acid sequence of SEQ ID NO: 1724; and the light chain variable region comprises a variable light CDR1 (LCDR1) having an amino acid sequence of SEQ ID NO: 1726; a variable light CDR2 (LCDR2) having an amino acid sequence of SEQ ID NO: 1728; and a variable light CDR3 (LCDR3) having an amino acid sequence of SEQ ID NO: 1729.

[0431] In some embodiments, the antibody, or antigen binding fragment thereof, comprises the heavy chain variable region comprises a variable heavy CDR1 (HCDR1) having at least one amino acid substitution relative to SEQ ID NO: 1731, 1721, or 1499; a variable heavy CDR2 (HCDR2) having at least one amino acid substitution relative to SEQ ID NO: 1732, 1733, 1506; and variable heavy CDR3 (HCDR3) having at least one amino acid substitution relative to SEQ ID NO: 1734, 1735, 1739, 1740, 1507, 1531, or 1532; and the light chain variable region comprises a variable light CDR1 (LCDR1) having at least one amino acid substitution relative to SEQ ID NO: 1502, 1736, or 1737; a variable light CDR2 (LCDR2) having at least one amino acid substitution relative to SEQ ID NO: 1497, 1717, or a peptide comprising the sequence of Ala-Ala-Ser; and a variable light CDR3 (LCDR3) having at least one amino acid substitution relative to SEQ ID NO: 1498, or 1738.

[0432] In some embodiments, the antibody, or antigen binding fragment thereof, comprises the heavy chain variable region comprises a HCDR1 comprising the amino acid sequence of SEQ ID NO: 1731, a HCDR2 comprising the amino acid sequence of SEQ ID NO: 1732, and a HCDR3 comprising the amino acid sequence of SEQ ID NO: 1734; and the light chain variable region comprises a LCDR1 comprising the amino acid sequence of SEQ ID NO: 1736, a LCDR2 comprising the amino acid sequence of SEQ ID NO: 1717, and a LCDR3 comprising the amino acid sequence of SEQ ID NO: 1738.

[0433] In some embodiments, the antibody, or antigen binding fragment thereof, comprises the heavy chain variable region comprises a HCDR1 comprising the amino acid sequence of SEQ ID NO: 1499, a HCDR2 comprising the amino acid sequence of SEQ ID NO: 1506, and a HCDR3 comprising the amino acid sequence of SEQ ID NO: 1507; and the light chain variable region comprises a LCDR1 comprising the amino acid sequence of SEQ ID NO: 1502, a LCDR2 comprising the amino acid sequence of SEQ ID NO: 1497, and a LCDR3 comprising the amino acid sequence of SEQ ID NO: 1498.

[0434] In some embodiments, the VH comprises a sequence as set forth in Table 12. In some embodiments, the VK comprises a sequence as set forth in Table 12. In some embodiments, the Ab comprises a VH and a VK as set forth for the clones in Table 12. In some embodiments, the VH and VK are linked by a linker. In some embodiments, the linker is a peptide linker as provided for herein. In some embodiments, the peptide linker is the linker as provided for in Table 12.

[0435] In some embodiments, an antibody, or antigen binding fragment thereof, comprises a heavy chain variable region and a light chain variable region, such as those provided herein. In some embodiments, the heavy chain variable region comprises an amino acid sequence having at least 90% identity to the amino acid sequence of SEQ ID NO: 1476, or 1478, and the light chain variable region comprises an amino acid sequence having at least 90% identity to the amino acid sequence of SEQ ID NO: 1359, or 1479.

[0436] In some embodiments, the heavy chain variable region comprises an amino acid sequence of SEQ ID NOs: 1476, or 1478, and the light chain variable region comprises an amino acid of SEQ ID NO: 1359, or 1479.

[0437] In some embodiments, the heavy chain variable region comprises the amino acid sequence of SEQ ID NO: 1476. In some embodiments, the heavy chain variable region comprises the amino acid sequence of SEQ ID NO: 1478.

[0438] In some embodiments, the light chain variable region comprises the amino acid sequence of SEQ ID NO: 1359. In some embodiments, the light chain variable region comprises the amino acid sequence of SEQ ID NO: 1479.

[0439] In some embodiments, the antibody, or antigen binding fragment thereof, comprises a light chain variable region comprising an amino acid sequence having at least 90% identity to an amino acid sequence selected from SEQ ID NOs: 1359, 1680, 1681, 1682, 1683, 1684, 1479, 1449, 1687, 1688, 1689, 1690, 1691, 1692, 1693, 1694, 1695, 1696, 1697, 1698, 1699, 1700, 1701, 1702, 1703, 1704, 1705, or 1706; and a heavy chain variable region comprising an amino acid sequence having at least 90% identity to an amino acid sequence selected from SEQ ID NOs: 1476, 1679, 1685, 1584, 1478, 1707, or 1708.

[0440] In some embodiments, the antibody, or antigen binding fragment thereof, comprises the heavy chain variable region comprises an amino acid sequence having at least 90% identity to the amino acid sequence of SEQ ID NO: 1445, 591, 1443, 1480, 1545, or 1542; and the light chain variable region comprises an amino acid sequence having at least 90% identity to the amino acid sequence of SEQ ID NO: 1367, 592, or 1543.

[0441] In some embodiments, the antibody, or antigen binding fragment thereof, comprises the heavy chain variable region comprises an amino acid sequence of SEQ ID NOs: 1445, 591, 1443, 1480, 1545, or 1542; and the light chain variable region comprises an amino acid of SEQ ID NO: 1367, 592, or 1543.

[0442] In some embodiments, a PD-1 agonist comprising four polypeptide chains, is provided. In some embodiments, the PD-1 agonist comprising four polypeptide chains comprises:
[0443] Chain 1: N terminus (nt)-VH1-CH1-CH2-CH3-Linker A-scFv[VL2-Linker B-VH2]-C terminus (ct);
[0444] Chain 2: nt-VH1-CH1-CH2-CH3-Linker A-scFv[VL2-Linker B-VH2]-ct;
[0445] Chain 3: nt-VL1-CK-ct; and
[0446] Chain 4: nt-VL1-CK-ct;
[0447] wherein:
   [0448] VH1 comprises the sequence of SEQ ID NO: 1476;
   [0449] CH1-CH2-CH3 comprises the sequence of SEQ ID NO: 44;
   [0450] Linker A comprises the sequence of SEQ ID NO: 30;
   [0451] VL2 comprises the sequence of SEQ ID NO: 1445;
   [0452] Linker B comprises the sequence of SEQ ID NO: 22;
   [0453] VH2 comprises the sequence of SEQ ID NO: 1367;
   [0454] VL1 comprises the sequence of SEQ ID NO: 1359; and
   [0455] CK comprises the sequence of SEQ ID NO: 45.

[0456] In some embodiments, an antibody comprises a light chain and a heavy chain. In some embodiments, the light chain comprises a sequence of:

(SEQ ID NO: 1751)
DIVMTQSPDSLAVSLGERATINCKSSQSVLYSPNNKNYLAWYQQK
PGQPPKLLIYWASTRESGVPDRFSGSGSGTDFTLTISSLQAEDVA
VYYCQQYYTTPPTFGQGTRLEIKRTVAAPSVFIFPPSDEQLKSGT
ASVVCLLNNFYPREAKVQWKVDNALQSGNSQESVTEQDSKDSTYS
LSSTLTLSKADYEKHKVYACEVTHQGLSSPVTKSFNRGEC.

[0457] In some embodiments, the heavy chain comprises a sequence of:

(SEQ ID NO: 1752)
EVQLLESGGGLVQPGGSLRLSCAASGFTFSSYDMSWVRQAPGKGL
EWVSGITISGGSTYY ADSVKGRFTISRDNSKNTLYLQMNSLRAE
DTAVYYCARGRGGSGWLDYWGQGTTVTVSSASTKGPSVFPLAPSS
KSTSGGTAALGCLVKDYFPEPVTVSWNSGALTSGVHTFPAVLQSS
GLYSLSSVVTVPSSSLGTQTYICNVNHKPSNTKVDKKVEPKSCDK
THTCPPCPAPEAAGAPSVFLFPPKPKDTLMISRTPEVTCVVVDVS
HEDPEVKFNWYVDGVEVHNAKTKPREEQYNSTYRVVSVLTVLHQD
WLNGKEYKCKVSNKALPAPIEKTISKAKGQPREPQVYTLPPSREE
MTKNQVSLTCLVKGFYPSDIAVEWESNGQPENNYKTTPPVLDSDG
SFFLYSKLTVDKSRWQQGNVFSCSVMHEALHNHYTQKSLSLSPGG
GGGSGGGGSGGGGSEVQLLESGGGLVQPGGSLRLSCAASGFTFSS
YWMHWVRQAPGKGLEWVSYISGSGGYTNYADSVKGRFTISRDNSK
NTLYLQMNSLRAEDTAVYYCARDRPYYYDMDVWGKGTTVTVSSGG
GGSGGGGSGGGGSGGGGSDIQMTQSPSSLSASVGDRVTITCRASQ
SISSSLAWYQQKPGKAPKLLIYAASSLQSGVPSRFSGSGSGTDFT
LTISSLQPEDFATYYCQQYKSYPVTFGQGTKVEIK.

[0458] In some embodiments, an antibody, or antigen binding fragment thereof, comprises a light chain comprising an amino acid sequence having at least 90% identity to an amino acid sequence of SEQ ID NO: 1751; and a heavy chain comprising an amino acid sequence having at least 90% identity to an amino acid sequence selected of SEQ ID NO: 1752.

[0459] In some embodiments, an antibody, or antigen binding fragment thereof, comprises a light chain comprising an amino acid sequence of SEQ ID NO: 1751; and a heavy chain comprising an amino acid sequence of SEQ ID NO: 1752.

Polypeptides Derived from Reference, e.g., Human Polypeptides

[0460] In some embodiments, a component of a therapeutic molecule is derived from or based on a reference molecule, e.g., in the case of a therapeutic molecule for use in humans, from a naturally occurring human polypeptide. E.g., In some embodiments, all or a part of a CD39 molecule, a CD73 molecule, a cell surface molecule binder, a donor specific targeting moiety, an effector ligand binding molecule, an ICIM binding/modulating moiety, an IIC binding/modulating moiety, an inhibitory immune checkpoint molecule ligand molecule, an inhibitory molecule counter ligand molecule, a SM binding/modulating moiety, a specific targeting moiety, a target ligand binding molecule, or a tissue specific targeting moiety, can be based on or derived from a naturally occurring human polypeptide. E.g., a PD-L1 molecule can be based on or derived from a human PD-L1 sequence.

[0461] In some embodiments, a therapeutic compound component, e.g., a PD-L1 molecule:
[0462] a) comprises all or a portion of, e.g., an active portion of, a naturally occurring form of the human polypeptide;
[0463] b) comprises all or a portion of, e.g., an active portion of, a human polypeptide having a sequence appearing in a database, e.g., GenBank database, on Jan. 11, 2017, a naturally occurring form of the human polypeptide that is not associated with a disease state;
[0464] c) comprises a human polypeptide having a sequence that differs by no more than 1, 2, 3, 4, 5, 10, 20, or 30 amino acid residues from a sequence of a) or b);
[0465] d) comprises a human polypeptide having a sequence that differs at no more than by 1, 2, 3, 4, 5 10, 20, or 30% its amino acids residues from a sequence of a) or b);
[0466] e) comprises a human polypeptide having a sequence that does not differ substantially from a sequence of a) or b); or
[0467] f) comprises a human polypeptide having a sequence of c), d), or e) that does not differ substantially in a biological activity, e.g., ability to enhance or inhibit an immune response, from a human polypeptide having the sequence of a) or b).

[0468] In some embodiments, therapeutic compounds can comprise a plurality of effector binding/modulating moieties. For example, a therapeutic compound can comprise two or more of the following selected from:
[0469] (a) an ICIM binding/modulating moiety; (b) an IIC binding/modulating moiety; (c) an SM binding/modulating moiety, or (d) an ICSM binding/modulating moiety. In some embodiments, for example, a therapeutic compound can comprise a plurality, e.g., two, ICIM binding/modulating moieties (wherein they are the same or different); by way of example, two that activate or agonize PD-1; a plurality, e.g., two, IIC binding/modulating moieties; (wherein they are the same or different); a plurality, e.g., two, SM binding/modulating moieties (wherein they are the same or different), or a plurality, e.g., tow, ICSM binding/modulating moieties (wherein they are the same or different). In some embodiments, the therapeutic compound can comprise an ICIM binding/modulating moiety and an IIC binding/modulating moiety; an ICIM binding/modulating moiety and an SM binding/modulating moiety; an IIC binding/modulating moiety and an SM binding/modulating moiety, an ICIM binding/modulating moiety and an ICSM binding/modulating moiety; an IIC binding/modulating moiety and an ICSM binding/modulating moiety; or an ICSM binding/modulating moiety and an SM binding/modulating moiety. In some embodiments, the therapeutic compound comprises a plurality of targeting moieties. In some embodiments, the targeting moieties can be the same or different.

### Pharmaceutical Compositions and Kits

[0470] In another aspect, the present embodiments provide compositions, e.g., pharmaceutically acceptable compositions, which include a therapeutic compound described herein, formulated together with a pharmaceutically acceptable carrier. As used herein, “pharmaceutically acceptable carrier” includes any and all solvents, dispersion media, isotonic and absorption delaying agents, and the like that are physiologically compatible.

[0471] The carrier can be suitable for intravenous, intramuscular, subcutaneous, parenteral, rectal, local, ophthalmic, topical, spinal or epidermal administration (e.g. by injection or infusion). As used herein, the term “carrier” means a diluent, adjuvant, or excipient with which a compound is administered. In some embodiments, pharmaceutical carriers can also be liquids, such as water and oils, including those of petroleum, animal, vegetable or synthetic origin, such as peanut oil, soybean oil, mineral oil, sesame oil and the like. The pharmaceutical carriers can also be saline, gum acacia, gelatin, starch paste, talc, keratin, colloidal silica, urea, and the like. In addition, auxiliary, stabilizing, thickening, lubricating and coloring agents can be used. The carriers can be used in pharmaceutical compositions comprising the therapeutic compounds provided for herein.

[0472] The compositions and compounds of the embodiments provided for herein may be in a variety of forms. These include, for example, liquid, semi-solid and solid dosage forms, such as liquid solutions (e.g., injectable and infusible solutions), dispersions or suspensions, liposomes and suppositories. The preferred form depends on the intended mode of administration and therapeutic application. Typical compositions are in the form of injectable or infusible solutions. In some embodiments, the mode of administration is parenteral (e.g., intravenous, subcutaneous, intraperitoneal, intramuscular). In some embodiments, the therapeutic molecule is administered by intravenous infusion or injection. In another embodiment, the therapeutic molecule is administered by intramuscular or subcutaneous injection. In another embodiment, the therapeutic molecule is administered locally, e.g., by injection, or topical application, to a target site.

[0473] The phrases “parenteral administration” and “administered parenterally” as used herein means modes of administration other than enteral and topical administration, usually by injection, and includes, without limitation, intravenous, intramuscular, intraarterial, intrathecal, intracapsular, intraorbital, intracardiac, intradermal, intraperitoneal, transtracheal, subcutaneous, subcuticular, intraarticular, subcapsular, subarachnoid, intraspinal, epidural and intrasternal injection and infusion.

[0474] Therapeutic compositions typically should be sterile and stable under the conditions of manufacture and storage. The composition can be formulated as a solution, microemulsion, dispersion, liposome, or other ordered structure suitable to high therapeutic molecule concentration. Sterile injectable solutions can be prepared by incorporating the active compound (i.e., therapeutic molecule) in the required amount in an appropriate solvent with one or a combination of ingredients enumerated above, as required, followed by filtered sterilization. Generally, dispersions are prepared by incorporating the active compound into a sterile vehicle that contains a basic dispersion medium and the required other ingredients from those enumerated above. In the case of sterile powders for the preparation of sterile injectable solutions, the preferred methods of preparation are vacuum drying and freeze-drying that yields a powder of the active ingredient plus any additional desired ingredient from a previously sterile-filtered solution thereof. The proper fluidity of a solution can be maintained, for example, by the use of a coating such as lecithin, by the maintenance of the required particle size in the case of dispersion and by the use of surfactants. Prolonged absorption of injectable compositions can be brought about by including in the composition an agent that delays absorption, for example, monostearate salts and gelatin.

[0475] As will be appreciated by the skilled artisan, the route and/or mode of administration will vary depending upon the desired results. In certain embodiments, the active compound may be prepared with a carrier that will protect the compound against rapid release, such as a controlled release formulation, including implants, transdermal patches, and microencapsulated delivery systems. Biodegradable, biocompatible polymers can be used, such as ethylene vinyl acetate, polyanhydrides, polyglycolic acid, collagen, polyorthoesters, and polylactic acid. Many methods for the preparation of such formulations are patented or generally known to those skilled in the art. See, e.g., Sustained and Controlled Release Drug Delivery Systems, J. R. Robinson, ed., Marcel Dekker, Inc., New York, 1978.

[0476] In certain embodiments, a therapeutic compound can be orally administered, for example, with an inert diluent or an assimilable edible carrier. The compound (and other ingredients, if desired) may also be enclosed in a hard or soft shell gelatin capsule, compressed into tablets, or incorporated directly into the subject's diet. For oral therapeutic administration, the compounds may be incorporated with excipients and used in the form of ingestible tablets, buccal tablets, troches, capsules, elixirs, suspensions, syrups, wafers, and the like. To administer a compound by other than parenteral administration, it may be necessary to coat the compound with, or co-administer the compound with, a material to prevent its inactivation. Therapeutic compositions can also be administered with medical devices known in the art.

[0477] Dosage regimens are adjusted to provide the optimum desired response (e.g., a therapeutic response). For example, a single bolus may be administered, several divided doses may be administered over time or the dose may be proportionally reduced or increased as indicated by the exigencies of the therapeutic situation. It is especially advantageous to formulate parenteral compositions in dosage unit form for ease of administration and uniformity of dosage. Dosage unit form as used herein refers to physically discrete units suited as unitary dosages for the subjects to be treated; each unit contains a predetermined quantity of active compound calculated to produce the desired therapeutic effect in association with the required pharmaceutical carrier. The specification for the dosage unit forms are dictated by and directly dependent on (a) the unique characteristics of the active compound and the particular therapeutic effect to be achieved, and (b) the limitations inherent in the art of compounding such an active compound for the treatment of sensitivity in individuals.

[0478] An exemplary, non-limiting range for a therapeutically or prophylactically effective amount of a therapeutic compound is 0.1-30 mg/kg, more preferably 1-25 mg/kg. Dosages and therapeutic regimens of the therapeutic compound can be determined by a skilled artisan. In certain embodiments, the therapeutic compound is administered by injection (e.g., subcutaneously or intravenously) at a dose of about 1 to 40 mg/kg, e.g., 1 to 30 mg/kg, e.g., about 5 to 25 mg/kg, about 10 to 20 mg/kg, about 1 to 5 mg/kg, 1 to 10 mg/kg, 5 to 15 mg/kg, 10 to 20 mg/kg, 15 to 25 mg/kg, or about 3 mg/kg. The dosing schedule can vary from e.g., once a week to once every 2, 3, or 4 weeks. In one embodiment, the therapeutic compound is administered at a dose from about 10 to 20 mg/kg every other week. The therapeutic compound can be administered by intravenous infusion at a rate of more than 20 mg/min, e.g., 20-40 mg/min, and typically greater than or equal to 40 mg/min to reach a dose of about 35 to 440 mg/m2, typically about 70 to 310 mg/m2, and more typically, about 110 to 130 mg/m2. In embodiments, the infusion rate of about 110 to 130 mg/m2 achieves a level of about 3 mg/kg. In other embodiments, the therapeutic compound can be administered by intravenous infusion at a rate of less than 10 mg/min, e.g., less than or equal to 5 mg/min to reach a dose of about 1 to 100 mg/m2, e.g., about 5 to 50 mg/m2, about 7 to 25 mg/m2, or, about 10 mg/m2. In some embodiments, the therapeutic compound is infused over a period of about 30 min. It is to be noted that dosage values may vary with the type and severity of the condition to be alleviated. It is to be further understood that for any particular subject, specific dosage regimens should be adjusted over time according to the individual need and the professional judgment of the person administering or supervising the administration of the compositions, and that dosage ranges set forth herein are exemplary only and are not intended to limit the scope or practice of the claimed composition.

[0479] The pharmaceutical compositions may include a “therapeutically effective amount” or a “prophylactically effective amount” of a therapeutic molecule. A “therapeutically effective amount” refers to an amount effective, at dosages and for periods of time necessary, to achieve the desired therapeutic result. A therapeutically effective amount of a therapeutic molecule may vary according to factors such as the disease state, age, sex, and weight of the individual, and the ability of the therapeutic compound to elicit a desired response in the individual. A therapeutically effective amount is also one in which any toxic or detrimental effects of a therapeutic molecule t is outweighed by the therapeutically beneficial effects. A “therapeutically effective dosage” preferably inhibits a measurable parameter, e.g., immune attack at least about 20%, more preferably by at least about 40%, even more preferably by at least about 60%, and still more preferably by at least about 80% relative to untreated subjects. The ability of a compound to inhibit a measurable parameter, e.g., immune attack, can be evaluated in an animal model system predictive of efficacy in transplant rejection or autoimmune disorders. Alternatively, this property of a composition can be evaluated by examining the ability of the compound to inhibit, such inhibition in vitro by assays known to the skilled practitioner.

[0480] A “prophylactically effective amount” refers to an amount effective, at dosages and for periods of time necessary, to achieve the desired prophylactic result. Typically, since a prophylactic dose is used in subjects prior to or at an earlier stage of disease, the prophylactically effective amount will be less than the therapeutically effective amount.

[0481] Also within the scope of the embodiments is a kit comprising a therapeutic compound described herein. The kit can include one or more other elements including: instructions for use; other reagents, e.g., a label, a therapeutic agent, or an agent useful for chelating, or otherwise coupling, a therapeutic molecule to a label or other therapeutic agent, or a radioprotective composition; devices or other materials for preparing the therapeutic molecule for administration; pharmaceutically acceptable carriers; and devices or other materials for administration to a subject.

[0482] In some embodiments, an isolated nucleic acid is provided, wherein the nucleic acid encodes a polypeptide, an antibody, or antigen binding fragment thereof, as provided for herein. In some embodiments, an expression vector comprising the nucleic acid is provided. In some embodiment, a host cell comprising the isolated nucleic acid as provided for herein, or the vector as provided for herein is provided. In some embodiments, a method of making a polypeptide or antibody as provided for herein is provided. In some embodiments, the method comprises culturing a host cell as provided for herein to make the polypeptide or antibody as provided for herein. In some embodiments, a method of producing an antibody or antigen binding fragment thereof as provide for herein comprises (a) culturing a host cell comprising one or more nucleic acids encoding the antibody or antigen binding fragment thereof in a culture medium under conditions favorable for expression of the one or more nucleic acids and (b) optionally recovering the antibody or antigen binding fragment thereof from the culture medium.

[0483] In some embodiments, a method of making or producing a polypeptide, or an antibody, or antigen binding fragment thereof, is provided, wherein the polypeptide, or the antibody, or antigen binding fragment thereof, comprises a heavy chain variable region and a light chain variable region, wherein: the heavy chain variable region comprises a variable heavy CDR1 (HCDR1) having at least 90% identity to the amino acid sequence of SEQ ID NO: 1709, 1719, or 1731; a variable heavy CDR2 (HCDR2) having at least 90% identity to the amino acid sequence of SEQ ID NO: 1712, 1744, or 1732; and variable heavy CDR3 (HCDR3) having at least 90% identity to the amino acid sequence of SEQ ID NO: 1715, 1724, or 1734; and the light chain variable region comprises a variable light CDR1 (LCDR1) having at least 90% identity to the amino acid sequence of SEQ ID NO: 1716, 1726, or 1736; a variable light CDR2 (LCDR2) having at least 90% identity to the amino acid sequence of SEQ ID NO: 1717, 1728; and a variable light CDR3 (LCDR3) having at least 90% identity to the amino acid sequence of SEQ ID NO: 1718, 1729, or 1738. In some embodiments, a method of making or producing a polypeptide, or an antibody, or antigen binding fragment thereof, is provided, wherein the heavy chain variable region comprises an amino acid sequence of SEQ ID NOs: 1476, or 1478; and the light chain variable region comprises an amino acid of SEQ ID NO: 1359, or 1479.

[0484] In some embodiments, a method of making or producing a polypeptide, or an antibody, or antigen binding fragment thereof, is provided, wherein the polypeptide, or the antibody, or antigen binding fragment thereof comprises a heavy chain variable region and a light chain variable region, wherein the heavy chain variable region comprises a variable heavy CDR1 (HCDR1) having at least 90% identity to the amino acid sequence of SEQ ID NO: 1709, 1719, or 1731; a variable heavy CDR2 (HCDR2) having at least 90% identity to the amino acid sequence of SEQ ID NO: 1712, 1744, or 1732; and variable heavy CDR3 (HCDR3) having at least 90% identity to the amino acid sequence of SEQ ID NO: 1715, 1724, or 1734; and the light chain variable region comprises a variable light CDR1 (LCDR1) having at least 90% identity to the amino acid sequence of SEQ ID NO: 1716, 1726, or 1736; a variable light CDR2 (LCDR2) having at least 90% identity to the amino acid sequence of SEQ ID NO: 1717, 1728; and a variable light CDR3 (LCDR3) having at least 90% identity to the amino acid sequence of SEQ ID NO: 1718, 1729, or 1738; wherein the method comprises (a) culturing a host cell comprising one or more nucleic acids encoding the antibody or antigen binding fragment thereof in a culture medium under conditions favorable for expression of the one or more nucleic acids encoding the heavy chain variable region comprising a variable heavy CDR1 (HCDR1) having at least 90% identity to the amino acid sequence of SEQ ID NO: 1709, 1719, or 1731; a variable heavy CDR2 (HCDR2) having at least 90% identity to the amino acid sequence of SEQ ID NO: 1712, 1744, or 1732; and variable heavy CDR3 (HCDR3) having at least 90% identity to the amino acid sequence of SEQ ID NO: 1715, 1724, or 1734; and the light chain variable region comprising a variable light CDR1 (LCDR1) having at least 90% identity to the amino acid sequence of SEQ ID NO: 1716, 1726, or 1736; a variable light CDR2 (LCDR2) having at least 90% identity to the amino acid sequence of SEQ ID NO: 1717, 1728; and a variable light CDR3 (LCDR3) having at least 90% identity to the amino acid sequence of SEQ ID NO: 1718, 1729, or 1738; and (b) optionally recovering the antibody or antigen binding fragment thereof from the culture medium.

[0485] In some embodiments, a method of making or producing a polypeptide, or an antibody, or antigen binding fragment thereof, is provided, wherein the heavy chain variable region comprises an amino acid sequence of SEQ ID NOs: 1479, or 1478; and the light chain variable region comprises an amino acid of SEQ ID NO: 1359, or 1479; wherein the method comprises (a) culturing a host cell comprising one or more nucleic acids encoding the antibody or antigen binding fragment thereof in a culture medium under conditions favorable for expression of the one or more nucleic acids encoding the heavy chain variable region comprising an amino acid sequence of SEQ ID NOs: 1479, or 1478; and the light chain variable region comprising an amino acid of SEQ ID NO: 1359, or 1479; and (b) optionally recovering the antibody or antigen binding fragment thereof from the culture medium.

[0486] In some embodiments, embodiments provided herein also include, but are not limited to:

### What is Embodimented is:

[0487] 1. An antibody, or antigen binding fragment thereof, comprises comprising a heavy chain variable region and a light chain variable region, wherein:
[0488] the heavy chain variable region comprises a variable heavy CDR1 (HCDR1) having at least one amino acid of substitution relative to SEQ ID NOs NO: 1709, or 1719; a variable heavy CDR2 (HCDR2) having at least one amino acid substitution relative to SEQ ID NO: 1712, or 1744; and the variable heavy CDR3 has the (HCDR3) having at least one amino acid substitution relative to SEQ ID NO: 1715, or 1724; and
[0489] the light chain variable region comprises a variable light CDR1 (LCDR1) having at least one amino acid substitution relative to SEQ ID NO: 1716, or 1726; a variable light CDR2 (LCDR2) having at least one amino acid substitution relative to SEQ ID NO: 1717, or 1728; and a variable light CDR3 (LCDR3) having at least one amino acid substitution relative to SEQ ID NO: 1718, or 1729.

[0490] 2. The antibody, or antigen binding fragment thereof, of embodiment 1, wherein the heavy chain variable region comprises a HCDR1 comprising the amino acid sequence of SEQ ID NO: 1719, a HCDR2 comprising the amino acid sequence of SEQ ID NO: 1744, and a HCDR3 comprising the amino acid sequence of SEQ ID NO: 1724.

[0491] 3. The antibody, or antigen binding fragment thereof, of embodiment 1, wherein the heavy chain variable region comprises a HCDR1 comprising the amino acid sequence of SEQ ID NO: 1709, a HCDR2 comprising the amino acid sequence of SEQ ID NO: 1712, and a HCDR3 comprising the amino acid sequence of SEQ ID NO: 1715.

[0492] 4. The antibody, or antigen binding fragment thereof, of any one of embodiments 1-3, wherein the light chain variable region comprises a LCDR1 comprising the amino acid sequence of SEQ ID NO: 1726, a LCDR2 comprising the amino acid sequence of SEQ ID NO: 1728, and a LCDR3 comprising the amino acid sequence of SEQ ID NO: 1729.

[0493] 5. The antibody, or antigen binding fragment thereof, of any one of embodiments 1-3, wherein the light chain variable region comprises a LCDR1 comprising the amino acid sequence of SEQ ID NO: 1716, a LCDR2 comprising the amino acid sequence of SEQ ID NO: 1717, and a LCDR3 comprising the amino acid sequence of SEQ ID NO: 1718.

[0494] 6. The antibody, or antigen binding fragment thereof, of embodiment 1, wherein the heavy chain variable region comprises an amino acid sequence having at least 90% identity to the amino acid sequence of SEQ ID NO: 1476, or 1478, and the light chain variable region comprises an amino acid sequence having at least 90% identity to the amino acid sequence of SEQ ID NO: 1359, or 1479.

[0495] 7. The antibody, or antigen binding fragment thereof, of any one of embodiments 1-6, wherein the heavy chain variable region comprises an amino acid sequence of SEQ ID NOs: 1476, or 1478, and the light chain variable region comprises an amino acid of SEQ ID NO: 1359, or 1479.

[0496] 8. The antibody, or antigen binding fragment thereof, of embodiment 7, wherein the heavy chain variable region comprises the amino acid sequence of SEQ ID NO: 1476.

[0497] 9. The antibody, or antigen binding fragment thereof, of embodiment 7, wherein the heavy chain variable region comprises the amino acid sequence of SEQ ID NO: 1478.

[0498] 10. The antibody, or antigen binding fragment thereof, of embodiment 7, wherein the light chain variable region comprises the amino acid sequence of SEQ ID NO: 1359.

[0499] 11. The antibody, or antigen binding fragment thereof, of embodiment 7, wherein the light chain variable region comprises the amino acid sequence of SEQ ID NO: 1479.

[0500] 12. An antibody, or antigen binding fragment thereof, comprising a heavy chain variable region and a light chain variable region, wherein:
[0501] the heavy chain variable region comprises a variable heavy CDR1 (HCDR1) having an amino acid sequence of SEQ ID NO: 1719; a variable heavy CDR2 (HCDR2) having an amino acid sequence of SEQ ID NO: 1744; and variable heavy CDR3 (HCDR3) having an amino acid sequence of SEQ ID NO: 1724; and
[0502] the light chain variable region comprises a variable light CDR1 (LCDR1) having an amino acid sequence of SEQ ID NO: 1726; a variable light CDR2 (LCDR2) having an amino acid sequence of SEQ ID NO: 1728; and a variable light CDR3 (LCDR3) having an amino acid sequence of SEQ ID NO: 1729.

[0503] 13. The antibody, or antigen binding fragment thereof, of any one of embodiments 1-12, wherein the heavy chain variable region and the light chain variable region are in a Fab format.

[0504] 14. The antibody, or antigen binding fragment thereof, of any one of embodiments 1-13, wherein the heavy chain variable region and the light variable chain region are linked with a peptide linker.

[0505] 15. The antibody, or antigen binding fragment thereof, of embodiment 14, wherein the peptide linker is a glycine/serine linker.

[0506] 16. The antibody, or antigen binding fragment thereof, of embodiment 15, wherein the peptide linker comprises a sequence of GGGGSGGGGSGGGGSGGGGS (SEQ ID NO: 22), GGGGSGGGGSGGGGS (SEQ ID NO: 30), GGGGSGGGGS (SEQ ID NO: 619), GGGGS (SEQ ID NO: 23), or GGGSEGGGSEGGGSE (SEQ ID NO: 1546), or any combination thereof.

[0507] 17. An antibody, or antigen binding fragment thereof, wherein the antibody comprises:
[0508] a light chain variable region comprising an amino acid sequence having at least 90% identity to an amino acid sequence selected from SEQ ID NOs: 1359, 1680, 1681, 1682, 1683, 1684, 1479, 1449, 1687, 1688, 1689, 1690, 1691, 1692, 1693, 1694, 1695, 1696, 1697, 1698, 1699, 1700, 1701, 1702, 1703, 1704, 1705, or 1706; and
[0509] a heavy chain variable region comprising an amino acid sequence having at least 90% identity to an amino acid sequence selected from SEQ ID NOs: 1476, 1679, 1685, 1584, 1478, 1707, or 1708.

[0510] 18. The antibody of embodiment 17, or antigen binding fragment thereof, wherein the antibody comprises:
[0511] i. a variable light chain sequence of SEQ ID NO: 1359, or a variant thereof, and a variable heavy chain sequence of SEQ ID NO: 1476, or a variant thereof;
[0512] ii. a variable light chain sequence of SEQ ID NO: 1359, or a variant thereof, and a variable heavy chain sequence of SEQ ID NO: 1679, or a variant thereof;
[0513] iii. a variable light chain sequence of SEQ ID NO: 1359, or a variant thereof, and a variable heavy chain sequence of SEQ ID NO: 1685, or a variant thereof;
[0514] iv. a variable light chain sequence of SEQ ID NO: 1359, or a variant thereof, and a variable heavy chain sequence of SEQ ID NO: 1584, or a variant thereof;
[0515] v. a variable light chain sequence of SEQ ID NO: 1359, or a variant thereof, and a variable heavy chain sequence of SEQ ID NO: 1478, or a variant thereof;
[0516] vi. a variable light chain sequence of SEQ ID NO: 1359, or a variant thereof, and a variable heavy chain sequence of SEQ ID NO: 1707, or a variant thereof;
[0517] vii. a variable light chain sequence of SEQ ID NO: 1680, or a variant thereof, and a variable heavy chain sequence of SEQ ID NO: 1476, or a variant thereof;
[0518] viii. a variable light chain sequence of SEQ ID NO: 1680, or a variant thereof, and a variable heavy chain sequence of SEQ ID NO: 1679, or a variant thereof;
[0519] ix. a variable light chain sequence of SEQ ID NO: 1680, or a variant thereof, and a variable heavy chain sequence of SEQ ID NO: 1685, or a variant thereof;
[0520] x. a variable light chain sequence of SEQ ID NO: 1680, or a variant thereof, and a variable heavy chain sequence of SEQ ID NO: 1584, or a variant thereof;
[0521] xi. a variable light chain sequence of SEQ ID NO: 1680, or a variant thereof, and a variable heavy chain sequence of SEQ ID NO: 1478, or a variant thereof;
[0522] xii. a variable light chain sequence of SEQ ID NO: 1680, or a variant thereof, and a variable heavy chain sequence of SEQ ID NO: 1707, or a variant thereof;
[0523] xiii. a variable light chain sequence of SEQ ID NO: 1681, or a variant thereof, and a variable heavy chain sequence of SEQ ID NO: 1476, or a variant thereof;
[0524] xiv. a variable light chain sequence of SEQ ID NO: 1681, or a variant thereof, and a variable heavy chain sequence of SEQ ID NO: 1679, or a variant thereof;
[0525] xv. a variable light chain sequence of SEQ ID NO: 1681, or a variant thereof, and a variable heavy chain sequence of SEQ ID NO: 1685, or a variant thereof;
[0526] xvi. a variable light chain sequence of SEQ ID NO: 1681, or a variant thereof, and a variable heavy chain sequence of SEQ ID NO: 1584, or a variant thereof;
[0527] xvii. a variable light chain sequence of SEQ ID NO: 1681, or a variant thereof, and a variable heavy chain sequence of SEQ ID NO: 1478, or a variant thereof;
[0528] xviii. a variable light chain sequence of SEQ ID NO: 1681, or a variant thereof, and a variable heavy chain sequence of SEQ ID NO: 1707, or a variant thereof;
[0529] xix. a variable light chain sequence of SEQ ID NO: 1682, or a variant thereof, and a variable heavy chain sequence of SEQ ID NO: 1476, or a variant thereof;
[0530] xx. a variable light chain sequence of SEQ ID NO: 1682, or a variant thereof, and a variable heavy chain sequence of SEQ ID NO: 1679, or a variant thereof;
[0531] xxi. a variable light chain sequence of SEQ ID NO: 1682, or a variant thereof, and a variable heavy chain sequence of SEQ ID NO: 1685, or a variant thereof;
[0532] xxii. a variable light chain sequence of SEQ ID NO: 1682, or a variant thereof, and a variable heavy chain sequence of SEQ ID NO: 1584, or a variant thereof;
[0533] xxiii. a variable light chain sequence of SEQ ID NO: 1682, or a variant thereof, and a variable heavy chain sequence of SEQ ID NO: 1478, or a variant thereof;
[0534] xxiv. a variable light chain sequence of SEQ ID NO: 1682, or a variant thereof, and a variable heavy chain sequence of SEQ ID NO: 1707, or a variant thereof;
[0535] xxv. a variable light chain sequence of SEQ ID NO: 1683, or a variant thereof, and a variable heavy chain sequence of SEQ ID NO: 1476, or a variant thereof;
[0536] xxvi. a variable light chain sequence of SEQ ID NO: 1683, or a variant thereof, and a variable heavy chain sequence of SEQ ID NO: 1679, or a variant thereof;
[0537] xxvii. a variable light chain sequence of SEQ ID NO: 1683, or a variant thereof, and a variable heavy chain sequence of SEQ ID NO: 1685, or a variant thereof;
[0538] xxviii. a variable light chain sequence of SEQ ID NO: 1683, or a variant thereof, and a variable heavy chain sequence of SEQ ID NO: 1584, or a variant thereof;
[0539] xxix. a variable light chain sequence of SEQ ID NO: 1683, or a variant thereof, and a variable heavy chain sequence of SEQ ID NO: 1478, or a variant thereof;
[0540] xxx. a variable light chain sequence of SEQ ID NO: 1683, or a variant thereof, and a variable heavy chain sequence of SEQ ID NO: 1707, or a variant thereof;
[0541] xxxi. a variable light chain sequence of SEQ ID NO: 1684, or a variant thereof, and a variable heavy chain sequence of SEQ ID NO: 1476, or a variant thereof;
[0542] xxxii. a variable light chain sequence of SEQ ID NO: 1684, or a variant thereof, and a variable heavy chain sequence of SEQ ID NO: 1679, or a variant thereof;
[0543] xxxiii. a variable light chain sequence of SEQ ID NO: 1684, or a variant thereof, and a variable heavy chain sequence of SEQ ID NO: 1685, or a variant thereof;
[0544] xxxiv. a variable light chain sequence of SEQ ID NO: 1684, or a variant thereof, and a variable heavy chain sequence of SEQ ID NO: 1584, or a variant thereof;
[0545] xxxv. a variable light chain sequence of SEQ ID NO: 1684, or a variant thereof, and a variable heavy chain sequence of SEQ ID NO: 1478, or a variant thereof;
[0546] xxxvi. a variable light chain sequence of SEQ ID NO: 1684, or a variant thereof, and a variable heavy chain sequence of SEQ ID NO: 1707, or a variant thereof;
[0547] xxxvii. a variable light chain sequence of SEQ ID NO: 1479, or a variant thereof, and a variable heavy chain sequence of SEQ ID NO: 1476, or a variant thereof;
[0548] xxxviii. a variable light chain sequence of SEQ ID NO: 1479, or a variant thereof, and a variable heavy chain sequence of SEQ ID NO: 1679, or a variant thereof;
[0549] xxxix. a variable light chain sequence of SEQ ID NO: 1479, or a variant thereof, and a variable heavy chain sequence of SEQ ID NO: 1685, or a variant thereof;
[0550] xl. a variable light chain sequence of SEQ ID NO: 1479, or a variant thereof, and a variable heavy chain sequence of SEQ ID NO: 1584, or a variant thereof;
[0551] xli. a variable light chain sequence of SEQ ID NO: 1479, or a variant thereof, and a variable heavy chain sequence of SEQ ID NO: 1478, or a variant thereof;
[0552] xlii. a variable light chain sequence of SEQ ID NO: 1479, or a variant thereof, and a variable heavy chain sequence of SEQ ID NO: 1707, or a variant thereof;
[0553] xliii. a variable light chain sequence of SEQ ID NO: 1449, or a variant thereof, and a variable heavy chain sequence of SEQ ID NO: 1476, or a variant thereof;
[0554] xliv. a variable light chain sequence of SEQ ID NO: 1449, or a variant thereof, and a variable heavy chain sequence of SEQ ID NO: 1679, or a variant thereof;
[0555] xlv. a variable light chain sequence of SEQ ID NO: 1449, or a variant thereof, and a variable heavy chain sequence of SEQ ID NO: 1685, or a variant thereof;
[0556] xlvi. a variable light chain sequence of SEQ ID NO: 1449, or a variant thereof, and a variable heavy chain sequence of SEQ ID NO: 1584, or a variant thereof;
[0557] xlvii. a variable light chain sequence of SEQ ID NO: 1449, or a variant thereof, and a variable heavy chain sequence of SEQ ID NO: 1478, or a variant thereof;
[0558] xlviii. a variable light chain sequence of SEQ ID NO: 1449, or a variant thereof, and a variable heavy chain sequence of SEQ ID NO: 1707, or a variant thereof;
[0559] xlix. a variable light chain sequence of SEQ ID NO: 1687, or a variant thereof, and a variable heavy chain sequence of SEQ ID NO: 1476, or a variant thereof;
[0560] l. a variable light chain sequence of SEQ ID NO: 1687, or a variant thereof, and a variable heavy chain sequence of SEQ ID NO: 1679, or a variant thereof;
[0561] li. a variable light chain sequence of SEQ ID NO: 1687, or a variant thereof, and a variable heavy chain sequence of SEQ ID NO: 1685, or a variant thereof;
[0562] lii. a variable light chain sequence of SEQ ID NO: 1687, or a variant thereof, and a variable heavy chain sequence of SEQ ID NO: 1584, or a variant thereof;
[0563] liii. a variable light chain sequence of SEQ ID NO: 1687, or a variant thereof, and a variable heavy chain sequence of SEQ ID NO: 1478, or a variant thereof;
[0564] liv. a variable light chain sequence of SEQ ID NO: 1687, or a variant thereof, and a variable heavy chain sequence of SEQ ID NO: 1707, or a variant thereof;
[0565] lv. a variable light chain sequence of SEQ ID NO: 1688, or a variant thereof, and a variable heavy chain sequence of SEQ ID NO: 1476, or a variant thereof;
[0566] lvi. a variable light chain sequence of SEQ ID NO: 1688, or a variant thereof, and a variable heavy chain sequence of SEQ ID NO: 1679, or a variant thereof;
[0567] lvii. a variable light chain sequence of SEQ ID NO: 1688, or a variant thereof, and a variable heavy chain sequence of SEQ ID NO: 1685, or a variant thereof;
[0568] lviii. a variable light chain sequence of SEQ ID NO: 1688, or a variant thereof, and a variable heavy chain sequence of SEQ ID NO: 1584, or a variant thereof;
[0569] lix. a variable light chain sequence of SEQ ID NO: 1688, or a variant thereof, and a variable heavy chain sequence of SEQ ID NO: 1478, or a variant thereof;
[0570] lx. a variable light chain sequence of SEQ ID NO: 1688, or a variant thereof, and a variable heavy chain sequence of SEQ ID NO: 1707, or a variant thereof;
[0571] lxi. a variable light chain sequence of SEQ ID NO: 1689, or a variant thereof, and a variable heavy chain sequence of SEQ ID NO: 1476, or a variant thereof;
[0572] lxii. a variable light chain sequence of SEQ ID NO: 1689, or a variant thereof, and a variable heavy chain sequence of SEQ ID NO: 1679, or a variant thereof;
[0573] lxiii. a variable light chain sequence of SEQ ID NO: 1689, or a variant thereof, and a variable heavy chain sequence of SEQ ID NO: 1685, or a variant thereof;
[0574] lxiv. a variable light chain sequence of SEQ ID NO: 1689, or a variant thereof, and a variable heavy chain sequence of SEQ ID NO: 1584, or a variant thereof;
[0575] lxv. a variable light chain sequence of SEQ ID NO: 1689, or a variant thereof, and a variable heavy chain sequence of SEQ ID NO: 1478, or a variant thereof;
[0576] lxvi. a variable light chain sequence of SEQ ID NO: 1689, or a variant thereof, and a variable heavy chain sequence of SEQ ID NO: 1707, or a variant thereof;
[0577] lxvii. a variable light chain sequence of SEQ ID NO: 1690, or a variant thereof, and a variable heavy chain sequence of SEQ ID NO: 1476, or a variant thereof;
[0578] lxviii. a variable light chain sequence of SEQ ID NO: 1690, or a variant thereof, and a variable heavy chain sequence of SEQ ID NO: 1679, or a variant thereof;
[0579] lxix. a variable light chain sequence of SEQ ID NO: 1690, or a variant thereof, and a variable heavy chain sequence of SEQ ID NO: 1685, or a variant thereof;
[0580] lxx. a variable light chain sequence of SEQ ID NO: 1690, or a variant thereof, and a variable heavy chain sequence of SEQ ID NO: 1584, or a variant thereof;
[0581] lxxi. a variable light chain sequence of SEQ ID NO: 1690, or a variant thereof, and a variable heavy chain sequence of SEQ ID NO: 1478, or a variant thereof;
[0582] lxxii. a variable light chain sequence of SEQ ID NO: 1690, or a variant thereof, and a variable heavy chain sequence of SEQ ID NO: 1707, or a variant thereof;
[0583] lxxiii. a variable light chain sequence of SEQ ID NO: 1691, or a variant thereof, and a variable heavy chain sequence of SEQ ID NO: 1476, or a variant thereof;
[0584] lxxiv. a variable light chain sequence of SEQ ID NO: 1691, or a variant thereof, and a variable heavy chain sequence of SEQ ID NO: 1679, or a variant thereof;
[0585] lxxv. a variable light chain sequence of SEQ ID NO: 1691, or a variant thereof, and a variable heavy chain sequence of SEQ ID NO: 1685, or a variant thereof;
[0586] lxxvi. a variable light chain sequence of SEQ ID NO: 1691, or a variant thereof, and a variable heavy chain sequence of SEQ ID NO: 1584, or a variant thereof;
[0587] lxxvii. a variable light chain sequence of SEQ ID NO: 1691, or a variant thereof, and a variable heavy chain sequence of SEQ ID NO: 1478, or a variant thereof;
[0588] lxxviii. a variable light chain sequence of SEQ ID NO: 1691, or a variant thereof, and a variable heavy chain sequence of SEQ ID NO: 1707, or a variant thereof;
[0589] lxxix. a variable light chain sequence of SEQ ID NO: 1692, or a variant thereof, and a variable heavy chain sequence of SEQ ID NO: 1476, or a variant thereof;
[0590] lxxx. a variable light chain sequence of SEQ ID NO: 1692, or a variant thereof, and a variable heavy chain sequence of SEQ ID NO: 1679, or a variant thereof;
[0591] lxxxi. a variable light chain sequence of SEQ ID NO: 1692, or a variant thereof, and a variable heavy chain sequence of SEQ ID NO: 1685, or a variant thereof;
[0592] lxxxii. a variable light chain sequence of SEQ ID NO: 1692, or a variant thereof, and a variable heavy chain sequence of SEQ ID NO: 1584, or a variant thereof;
[0593] lxxxiii. a variable light chain sequence of SEQ ID NO: 1692, or a variant thereof, and a variable heavy chain sequence of SEQ ID NO: 1478, or a variant thereof;
[0594] lxxxiv. a variable light chain sequence of SEQ ID NO: 1692, or a variant thereof, and a variable heavy chain sequence of SEQ ID NO: 1707, or a variant thereof;
[0595] lxxxv. a variable light chain sequence of SEQ ID NO: 1693, or a variant thereof, and a variable heavy chain sequence of SEQ ID NO: 1476, or a variant thereof;
[0596] lxxxvi. a variable light chain sequence of SEQ ID NO: 1693, or a variant thereof, and a variable heavy chain sequence of SEQ ID NO: 1679, or a variant thereof;
[0597] lxxxvii. a variable light chain sequence of SEQ ID NO: 1693, or a variant thereof, and a variable heavy chain sequence of SEQ ID NO: 1685, or a variant thereof;
[0598] lxxxviii. a variable light chain sequence of SEQ ID NO: 1693, or a variant thereof, and a variable heavy chain sequence of SEQ ID NO: 1584, or a variant thereof;
[0599] lxxxix. a variable light chain sequence of SEQ ID NO: 1693, or a variant thereof, and a variable heavy chain sequence of SEQ ID NO: 1478, or a variant thereof;
[0600] xc. a variable light chain sequence of SEQ ID NO: 1693, or a variant thereof, and a variable heavy chain sequence of SEQ ID NO: 1707, or a variant thereof;
[0601] xci. a variable light chain sequence of SEQ ID NO: 1694, or a variant thereof, and a variable heavy chain sequence of SEQ ID NO: 1476, or a variant thereof;
[0602] xcii. a variable light chain sequence of SEQ ID NO: 1694, or a variant thereof, and a variable heavy chain sequence of SEQ ID NO: 1679, or a variant thereof;
[0603] xciii. a variable light chain sequence of SEQ ID NO: 1694, or a variant thereof, and a variable heavy chain sequence of SEQ ID NO: 1685, or a variant thereof;
[0604] xciv. a variable light chain sequence of SEQ ID NO: 1694, or a variant thereof, and a variable heavy chain sequence of SEQ ID NO: 1584, or a variant thereof;
[0605] xcv. a variable light chain sequence of SEQ ID NO: 1694, or a variant thereof, and a variable heavy chain sequence of SEQ ID NO: 1478, or a variant thereof;
[0606] xcvi. a VK of SEQ ID NO: 1694, or a variant thereof, and a variable heavy chain sequence of SEQ ID NO: 1707, or a variant thereof;
[0607] xcvii. a variable light chain sequence of SEQ ID NO: 1695, or a variant thereof, and a variable heavy chain sequence of SEQ ID NO: 1476, or a variant thereof;
[0608] xcviii. a variable light chain sequence of SEQ ID NO: 1695, or a variant thereof, and a variable heavy chain sequence of SEQ ID NO: 1679, or a variant thereof;
[0609] xcix. a variable light chain sequence of SEQ ID NO: 1695, or a variant thereof, and a variable heavy chain sequence of SEQ ID NO: 1685, or a variant thereof;
[0610] c. a variable light chain sequence of SEQ ID NO: 1695, or a variant thereof, and a variable heavy chain sequence of SEQ ID NO: 1584, or a variant thereof;
[0611] ci. a variable light chain sequence of SEQ ID NO: 1695, or a variant thereof, and a variable heavy chain sequence of SEQ ID NO: 1478, or a variant thereof;
[0612] cii. a variable light chain sequence of SEQ ID NO: 1695, or a variant thereof, and a variable heavy chain sequence of SEQ ID NO: 1707, or a variant thereof;
[0613] ciii. a variable light chain sequence of SEQ ID NO: 1696, or a variant thereof, and a variable heavy chain sequence of SEQ ID NO: 1476, or a variant thereof;
[0614] civ. a variable light chain sequence of SEQ ID NO: 1696, or a variant thereof, and a variable heavy chain sequence of SEQ ID NO: 1679, or a variant thereof;
[0615] cv. a variable light chain sequence of SEQ ID NO: 1696, or a variant thereof, and a variable heavy chain sequence of SEQ ID NO: 1685, or a variant thereof;
[0616] cvi. a variable light chain sequence of SEQ ID NO: 1696, or a variant thereof, and a variable heavy chain sequence of SEQ ID NO: 1584, or a variant thereof;
[0617] cvii. a variable light chain sequence of SEQ ID NO: 1696, or a variant thereof, and a variable heavy chain sequence of SEQ ID NO: 1478, or a variant thereof;
[0618] cviii. a variable light chain sequence of SEQ ID NO: 1696, or a variant thereof, and a variable heavy chain sequence of SEQ ID NO: 1707, or a variant thereof;
[0619] cix. a variable light chain sequence of SEQ ID NO: 1697, or a variant thereof, and a variable heavy chain sequence of SEQ ID NO: 1476, or a variant thereof;
[0620] cx. a variable light chain sequence of SEQ ID NO: 1697, or a variant thereof, and a variable heavy chain sequence of SEQ ID NO: 1679, or a variant thereof;
[0621] cxi. a variable light chain sequence of SEQ ID NO: 1697, or a variant thereof, and a variable heavy chain sequence of SEQ ID NO: 1685, or a variant thereof;
[0622] cxii. a variable light chain sequence of SEQ ID NO: 1697, or a variant thereof, and a variable heavy chain sequence of SEQ ID NO: 1584, or a variant thereof;
[0623] cxiii. a variable light chain sequence of SEQ ID NO: 1697, or a variant thereof, and a variable heavy chain sequence of SEQ ID NO: 1478, or a variant thereof;
[0624] cxiv. a variable light chain sequence of SEQ ID NO: 1697, or a variant thereof, and a variable heavy chain sequence of SEQ ID NO: 1707, or a variant thereof;
[0625] cxv. a variable light chain sequence of SEQ ID NO: 1698, or a variant thereof, and a variable heavy chain sequence of SEQ ID NO: 1476, or a variant thereof;
[0626] cxvi. a variable light chain sequence of SEQ ID NO: 1698, or a variant thereof, and a variable heavy chain sequence of SEQ ID NO: 1679, or a variant thereof;
[0627] cxvii. a variable light chain sequence of SEQ ID NO: 1698, or a variant thereof, and a variable heavy chain sequence of SEQ ID NO: 1685, or a variant thereof;
[0628] cxviii. a variable light chain sequence of SEQ ID NO: 1698, or a variant thereof, and a variable heavy chain sequence of SEQ ID NO: 1584, or a variant thereof;
[0629] cxix. a variable light chain sequence of SEQ ID NO: 1698, or a variant thereof, and a variable heavy chain sequence of SEQ ID NO: 1478, or a variant thereof;
[0630] cxx. a variable light chain sequence of SEQ ID NO: 1698, or a variant thereof, and a variable heavy chain sequence of SEQ ID NO: 1707, or a variant thereof;
[0631] cxxi. a variable light chain sequence of SEQ ID NO: 1699, or a variant thereof, and a variable heavy chain sequence of SEQ ID NO: 1476, or a variant thereof;
[0632] cxxii. a variable light chain sequence of SEQ ID NO: 1699, or a variant thereof, and a variable heavy chain sequence of SEQ ID NO: 1679, or a variant thereof;
[0633] cxxiii. a variable light chain sequence of SEQ ID NO: 1699, or a variant thereof, and a variable heavy chain sequence of SEQ ID NO: 1685, or a variant thereof;
[0634] cxxiv. a variable light chain sequence of SEQ ID NO: 1699, or a variant thereof, and a variable heavy chain sequence of SEQ ID NO: 1584, or a variant thereof;
[0635] cxxv. a variable light chain sequence of SEQ ID NO: 1699, or a variant thereof, and a variable heavy chain sequence of SEQ ID NO: 1478, or a variant thereof;
[0636] cxxvi. a variable light chain sequence of SEQ ID NO: 1699, or a variant thereof, and a variable heavy chain sequence of SEQ ID NO: 1707, or a variant thereof;
[0637] cxxvii. a variable light chain sequence of SEQ ID NO: 1700, or a variant thereof, and a variable heavy chain sequence of SEQ ID NO: 1476, or a variant thereof;
[0638] cxxviii. a variable light chain sequence of SEQ ID NO: 1700, or a variant thereof, and a variable heavy chain sequence of SEQ ID NO: 1679, or a variant thereof;
[0639] cxxix. a variable light chain sequence of SEQ ID NO: 1700, or a variant thereof, and a variable heavy chain sequence of SEQ ID NO: 1685, or a variant thereof;
[0640] cxxx. a variable light chain sequence of SEQ ID NO: 1700, or a variant thereof, and a variable heavy chain sequence of SEQ ID NO: 1584, or a variant thereof;
[0641] cxxxi. a variable light chain sequence of SEQ ID NO: 1700, or a variant thereof, and a variable heavy chain sequence of SEQ ID NO: 1478, or a variant thereof;
[0642] cxxxii. a variable light chain sequence of SEQ ID NO: 1700, or a variant thereof, and a variable heavy chain sequence of SEQ ID NO: 1707, or a variant thereof;
[0643] cxxxiii. a variable light chain sequence of SEQ ID NO: 1701, or a variant thereof, and a variable heavy chain sequence of SEQ ID NO: 1476, or a variant thereof;
[0644] cxxxiv. a variable light chain sequence of SEQ ID NO: 1701, or a variant thereof, and a variable heavy chain sequence of SEQ ID NO: 1679, or a variant thereof;
[0645] cxxxv. a variable light chain sequence of SEQ ID NO: 1701, or a variant thereof, and a variable heavy chain sequence of SEQ ID NO: 1685, or a variant thereof;
[0646] cxxxvi. a variable light chain sequence of SEQ ID NO: 1701, or a variant thereof, and a variable heavy chain sequence of SEQ ID NO: 1584, or a variant thereof;
[0647] cxxxvii. a variable light chain sequence variable light chain sequence K of SEQ ID NO: 1701, or a variant thereof, and a variable heavy chain sequence of SEQ ID NO: 1478, or a variant thereof;
[0648] cxxxviii. a variable light chain sequence of SEQ ID NO: 1701, or a variant thereof, and a variable heavy chain sequence of SEQ ID NO: 1707, or a variant thereof;
[0649] cxxxix. a variable light chain sequence of SEQ ID NO: 1702, or a variant thereof, and a variable heavy chain sequence of SEQ ID NO: 1476, or a variant thereof;
[0650] cxl. a variable light chain sequence of SEQ ID NO: 1702, or a variant thereof, and a variable heavy chain sequence of SEQ ID NO: 1679, or a variant thereof;
[0651] cxli. a variable light chain sequence of SEQ ID NO: 1702, or a variant thereof, and a variable heavy chain sequence of SEQ ID NO: 1685, or a variant thereof;
[0652] cxlii. a variable light chain sequence of SEQ ID NO: 1702, or a variant thereof, and a variable heavy chain sequence of SEQ ID NO: 1584, or a variant thereof;
[0653] cxliii. a variable light chain sequence of SEQ ID NO: 1702, or a variant thereof, and a variable heavy chain sequence of SEQ ID NO: 1478, or a variant thereof;
[0654] cxliv. a variable light chain sequence of SEQ ID NO: 1702, or a variant thereof, and a variable heavy chain sequence of SEQ ID NO: 1707, or a variant thereof;
[0655] cxlv. a variable light chain sequence of SEQ ID NO: 1703, or a variant thereof, and a variable heavy chain sequence of SEQ ID NO: 1476, or a variant thereof;
[0656] cxlvi. a variable light chain sequence of SEQ ID NO: 1703, or a variant thereof, and a variable heavy chain sequence of SEQ ID NO: 1679, or a variant thereof;
[0657] cxlvii. a variable light chain sequence of SEQ ID NO: 1703, or a variant thereof, and a variable heavy chain sequence of SEQ ID NO: 1685, or a variant thereof;
[0658] cxlviii. a variable light chain sequence of SEQ ID NO: 1703, or a variant thereof, and a variable heavy chain sequence of SEQ ID NO: 1584, or a variant thereof;
[0659] cxlix. a variable light chain sequence of SEQ ID NO: 1703, or a variant thereof, and a variable heavy chain sequence of SEQ ID NO: 1478, or a variant thereof;
[0660] cl. a variable light chain sequence of SEQ ID NO: 1703, or a variant thereof, and a variable heavy chain sequence of SEQ ID NO: 1707, or a variant thereof;
[0661] cli. a variable light chain sequence of SEQ ID NO: 1704, or a variant thereof, and a variable heavy chain sequence of SEQ ID NO: 1476, or a variant thereof;
[0662] clii. a variable light chain sequence of SEQ ID NO: 1704, or a variant thereof, and a variable heavy chain sequence of SEQ ID NO: 1679, or a variant thereof;
[0663] cliii. a variable light chain sequence of SEQ ID NO: 1704, or a variant thereof, and a variable heavy chain sequence of SEQ ID NO: 1685, or a variant thereof;
[0664] cliv. a variable light chain sequence of SEQ ID NO: 1704, or a variant thereof, and a variable heavy chain sequence of SEQ ID NO: 1584, or a variant thereof;
[0665] clv. a variable light chain sequence of SEQ ID NO: 1704, or a variant thereof, and a variable heavy chain sequence of SEQ ID NO: 1478, or a variant thereof;
[0666] clvi. a variable light chain sequence of SEQ ID NO: 1704, or a variant thereof, and a variable heavy chain sequence of SEQ ID NO: 1707, or a variant thereof;
[0667] clvii. a variable light chain sequence of SEQ ID NO: 1705, or a variant thereof, and a variable heavy chain sequence of SEQ ID NO: 1476, or a variant thereof;
[0668] clviii. a variable light chain sequence of SEQ ID NO: 1705, or a variant thereof, and a variable heavy chain sequence of SEQ ID NO: 1679, or a variant thereof;
[0669] clix. a variable light chain sequence of SEQ ID NO: 1705, or a variant thereof, and a variable heavy chain sequence of SEQ ID NO: 1685, or a variant thereof;
[0670] clx. a variable light chain sequence of SEQ ID NO: 1705, or a variant thereof, and a variable heavy chain sequence of SEQ ID NO: 1584, or a variant thereof;
[0671] clxi. a variable light chain sequence of SEQ ID NO: 1705, or a variant thereof, and a variable heavy chain sequence of SEQ ID NO: 1478, or a variant thereof;
[0672] clxii. a variable light chain sequence of SEQ ID NO: 1705, or a variant thereof, and a variable heavy chain sequence of SEQ ID NO: 1707, or a variant thereof;
[0673] clxiii. a variable light chain sequence of SEQ ID NO: 1706, or a variant thereof, and a variable heavy chain sequence of SEQ ID NO: 1476, or a variant thereof;
[0674] clxiv. a variable light chain sequence of SEQ ID NO: 1706, or a variant thereof, and a variable heavy chain sequence of SEQ ID NO: 1679, or a variant thereof;
[0675] clxv. a variable light chain sequence of SEQ ID NO: 1706, or a variant thereof, and a variable heavy chain sequence of SEQ ID NO: 1685, or a variant thereof;
[0676] clxvi. a variable light chain sequence of SEQ ID NO: 1706, or a variant thereof, and a variable heavy chain sequence of SEQ ID NO: 1584, or a variant thereof;
[0677] clxvii. a variable light chain sequence of SEQ ID NO: 1706, or a variant thereof, and a variable heavy chain sequence of SEQ ID NO: 1478, or a variant thereof;
[0678] clxviii. a variable light chain sequence of SEQ ID NO: 1706, or a variant thereof, and a variable heavy chain sequence of SEQ ID NO: 1707, or a variant thereof.

[0679] 19. The antibody, or antigen binding fragment thereof, of any one of embodiments 1-18, wherein the antibody, or antigen binding fragment thereof, binds to PD-1.

[0680] 20. The antibody, or antigen binding fragment thereof, of embodiment 19, wherein the antibody, or antigen binding fragment thereof, that binds to PD-1 is a PD-1 agonist.

[0681] 21. The antibody, or antigen binding fragment thereof, of any of embodiments 1-20, wherein the antibody is linked or associated with another antibody or targeting moiety.

[0682] 22. The antibody, or antigen binding fragment thereof, of embodiment 21, wherein the another antibody or targeting moiety binds to MAdCAM.

[0683] 23. The antibody, or antigen binding fragment thereof, of embodiment 22, wherein the antibody that binds to MAdCAM comprises:
[0684] the heavy chain variable region comprises a variable heavy CDR1 (HCDR1) having at least one amino acid substitution relative to SEQ ID NO: 1731, 1721, or 1499; a variable heavy CDR2 (HCDR2) having at least one amino acid substitution relative to SEQ ID NO: 1732, 1733, 1506; and variable heavy CDR3 (HCDR3) having at least one amino acid substitution relative to SEQ ID NO: 1734, 1735, 1739, 1740, 1507, 1531, or 1532; and
[0685] the light chain variable region comprises a variable light CDR1 (LCDR1) having at least one amino acid substitution relative to SEQ ID NO: 1502, 1736, or 1737; a variable light CDR2 (LCDR2) having at least one amino acid substitution relative to SEQ ID NO: 1497, 1717, or a peptide comprising the sequence of Ala-Ala-Ser; and a variable light CDR3 (LCDR3) having at least one amino acid substitution relative to SEQ ID NO: 1498, or 1738.

[0686] 24. The antibody, or antigen binding fragment thereof, of any one of embodiments 22 or 23, wherein:
[0687] the heavy chain variable region comprises a HCDR1 comprising the amino acid sequence of SEQ ID NO: 1731, a HCDR2 comprising the amino acid sequence of SEQ ID NO: 1732, and a HCDR3 comprising the amino acid sequence of SEQ ID NO: 1734; and
[0688] the light chain variable region comprises a LCDR1 comprising the amino acid sequence of SEQ ID NO: 1736, a LCDR2 comprising the amino acid sequence of SEQ ID NO: 1717, and a LCDR3 comprising the amino acid sequence of SEQ ID NO: 1738.

[0689] 25. The antibody, or antigen binding fragment thereof, of any one of embodiments 22 or 23, wherein:
[0690] the heavy chain variable region comprises a HCDR1 comprising the amino acid sequence of SEQ ID NO: 1499, a HCDR2 comprising the amino acid sequence of SEQ ID NO: 1506, and a HCDR3 comprising the amino acid sequence of SEQ ID NO: 1507; and
[0691] the light chain variable region comprises a LCDR1 comprising the amino acid sequence of SEQ ID NO: 1502, a LCDR2 comprising the amino acid sequence of SEQ ID NO: 1497, and a LCDR3 comprising the amino acid sequence of SEQ ID NO: 1498.

[0692] 26. The antibody, or antigen binding fragment thereof, of any one of embodiments 22-25, wherein the heavy chain variable region comprises an amino acid sequence having at least 90% identity to the amino acid sequence of SEQ ID NO: 1445, 591, 1443, 1480, 1545, or 1542; and the light chain variable region comprises an amino acid sequence having at least 90% identity to the amino acid sequence of SEQ ID NO: 1367, 592, or 1543.

[0693] 27. The antibody, or antigen binding fragment thereof, of any one of embodiments 22-26, wherein the heavy chain variable region comprises an amino acid sequence of SEQ ID NOs: 1445, 591, 1443, 1480, 1545, or 1542; and the light chain variable region comprises an amino acid of SEQ ID NO: 1367, 592, or 1543.

[0694] 28. The antibody, or antigen binding fragment thereof, of embodiment 27, wherein the heavy chain variable region comprises the amino acid sequence of SEQ ID NO: 1445.

[0695] 29. The antibody, or antigen binding fragment thereof, of embodiment 27, wherein the light chain variable region comprises the amino acid sequence of SEQ ID NO: 1367.

[0696] 30. The antibody, or antigen binding fragment thereof, of any one of embodiments 22-29, wherein the antibody, or antigen binding fragment thereof, binds to MAdCAM.

[0697] 31. An antibody, or antigen binding fragment thereof, wherein the antibody comprises:
[0698] a light chain comprising an amino acid sequence having at least 90% identity to an amino acid sequence of SEQ ID NO: 1751; and
[0699] a heavy chain comprising an amino acid sequence having at least 90% identity to an amino acid sequence selected of SEQ ID NO: 1752.

[0700] 32. An antibody, or antigen binding fragment thereof, wherein the antibody comprises:
[0701] a light chain comprising an amino acid sequence of SEQ ID NO: 1751; and
[0702] a heavy chain comprising an amino acid sequence of SEQ ID NO: 1752.

[0703] 33. A PD-1 agonist comprising four polypeptide chains, wherein the four polypeptide chains comprise:
[0704] Chain 1: N terminus (nt)-VH1-CH1-CH2-CH3-Linker A-scFv[VL2-Linker B-VH2]-C terminus (ct);
[0705] Chain 2: nt-VH1-CH1-CH2-CH3-Linker A-scFv[VL2-Linker B-VH2]-ct;
[0706] Chain 3: nt-VL1-CK-ct; and
[0707] Chain 4: nt-VL1-CK-ct;
[0708] wherein:
[0709] VH1 comprises the sequence of SEQ ID NO: 1476;
[0710] CH1-CH2-CH3 comprises the sequence of SEQ ID NO: 44;
[0711] Linker A comprises the sequence of SEQ ID NO: 30;
[0712] VL2 comprises the sequence of SEQ ID NO: 1445;
[0713] Linker B comprises the sequence of SEQ ID NO: 2;
[0714] VH2 comprises the sequence of SEQ ID NO: 1367;
[0715] VL1 comprises the sequence of SEQ ID NO: 1359; and
[0716] CK comprises the sequence of SEQ ID NO: 45.

[0717] 34. The PD-1 agonist of embodiment 31, wherein the PD-1 agonist is a homodimer.

[0718] 35. A pharmaceutical composition comprising the antibody, or antigen binding fragment thereof, of any of embodiments 1-32, or the PD-1 agonist of embodiment 33 or 34, and a pharmaceutically acceptable carrier.

[0719] 36. A method of treating inflammatory bowel disease, the method comprising administering an antibody, or antigen binding fragment thereof, of any of embodiments 1-32, a PD-1 agonist of any of embodiments 33-34, or a pharmaceutical composition of embodiment 35, to a subject in need thereof.

[0720] 37. The method of embodiment 34, wherein the subject has Crohn's disease, or ulcerative colitis.

[0721] 38. A method of treating auto-immune hepatitis, primary sclerosing cholangitis, Type 1 diabetes, graft-versus-host disease (GVHD), or an autoimmune disorder, the method comprising administering an antibody, or antigen binding fragment thereof, of any of embodiments 1-32, a PD-1 agonist of any of embodiments 33-34, or a pharmaceutical composition of embodiment 35, to a subject in need thereof.

[0722] 39. An isolated nucleic acid molecule encoding the antibody, or an antigen binding fragment thereof, of any of embodiments 1-32.

[0723] 40. An expression vector comprising the isolated nucleic acid of embodiment 39.

[0724] 41. A host cell comprising the nucleic acid molecule of embodiment 39 or the expression vector of embodiment 40.

[0725] 42. A method of producing an antibody, or antigen binding fragment thereof, of any one of embodiments 1-32 comprising:
[0726] (a) culturing a host cell comprising one or more nucleic acids of embodiment 41 in a culture medium under conditions favorable for expression of the one or more nucleic acids; and
[0727] (b) optionally recovering the antibody or antigen binding fragment thereof from the culture medium.

[0728] The following examples are illustrative, but not limiting, of the compounds, compositions and methods described herein. Other suitable modifications and adaptations known to those skilled in the art are within the scope of the following embodiments.

### EXAMPLES

[0729] Non limiting examples of therapeutics, compounds, molecules, antibodies, compositions of matter, and examples may be found in PCT Application No. PCT/US2020/033707, which is hereby incorporated by reference in its entirety.

### Example 1. Anti-MAdCAM Molecule Variants with Disrupted Poly Y Patch do not Show Non Specific Binding to DNA and Insulin

[0730] Non-specific DNA and Insulin binding is predictive of poor pharmacokinetics (PK). An immunosorbent plate was coated with dsDNA at a concentration of 1 μg/mL or Insulin at 5 μg/mL in PBS pH 7.4, 75 ul/well, and incubated overnight at 4° C. Wells were washed three times with PBS pH 7.4 containing 0.05% Tween-20 (wash buffer), and then blocked with 200 ul/well 1% BSA in PBS pH 7.4 (block buffer) for two hours at room temperature. After three washes with wash buffer, test antibodies (TAs) and controls Lenzilumab and (humanized monoclonal antibody that binds to target colony stimulating factor 2/granulocyte-macrophage colony stimulating factor) and Elotuzumab (a humanized IgG1 monoclonal antibody that binds to SLAMF7 on NK cells) were diluted to a concentration of 100 nM in PBS containing 1% BSA and 0.05% Tween-20 (assay buffer). The diluted material was added to the DNA/insulin coated plate at 75 ul/well for 1 hour at room temperature. After three washes with wash buffer, donkey anti-human FcY HRP conjugated polyclonal antibody, diluted to 1:5000 in assay buffer, was added to the plate at 75 ul/well for 1 hr at room temperature. After three washes with wash buffer followed by three washes with wash buffer (with no tween-20), the assay was developed with 3,3′,5,5′-Tetramethylbenzidine (TMB), and stopped with TN HCL. OD 450 nm was measured. The experiment included appropriate controls for non-specific binding of test articles to the plate/block in the absence of DNA or insulin. PRNT1 showed dsDNA polyreactivity score of 45.64, and Insulin polyreactivity score of 6.21; MIAB128 showed dsDNA polyreactivity score of 33.01, and Insulin polyreactivity score of 2.62; MIAB129 showed dsDNA polyreactivity score of 3.51, and Insulin polyreactivity score of 2.43; MIAB130 showed dsDNA polyreactivity score of 29.66, and Insulin polyreactivity score of 3.26; MIAB131 showed dsDNA polyreactivity score of 13.49, and Insulin polyreactivity score of 8.00; MIAB133 showed dsDNA polyreactivity score of 44.80, and Insulin polyreactivity score of 13.16; MIAB134 showed dsDNA polyreactivity score of 45.96, and Insulin polyreactivity score of 25.53; MIAB136 showed dsDNA polyreactivity score of 51.85, and Insulin polyreactivity score of 75.37; MIAB137 showed dsDNA polyreactivity score of 43.44, and Insulin polyreactivity score of 67.33; MIAB139 showed dsDNA polyreactivity score of 1.09, and Insulin polyreactivity score of 2.08; MIAB141 showed dsDNA polyreactivity score of 33.26, and Insulin polyreactivity score of 4.18; MIAB144 showed dsDNA polyreactivity score of 47.18, and Insulin polyreactivity score of 5.07; Elotuzumab control showed dsDNA polyreactivity score of 1, and Insulin polyreactivity score of 1; and Lenzilumab control showed dsDNA polyreactivity score of 52.42, and Insulin polyreactivity score of 1.52. No non-specific binding to DNA and insulin was seen with MIAB129, MIAB139, and MIAB141. MIAB129, MIAB139, and MIAB141 were not polyreactive.

### Example 2. Anti-MAdCAM Molecule Variants with the A34N Substitution in LCDR1 do not Show Non Specific Binding to DNA and Insulin

[0731] Non-specific DNA and Insulin binding is predictive of poor pharmacokinetics (PK). An immunosorbent plate was coated with dsDNA at a concentration of 1 μg/mL or Insulin at 5 μg/mL in PBS pH 7.4, 75 ul/well, and incubated overnight at 4° C. Wells were washed three times with PBS pH 7.4 containing 0.05% Tween-20 (wash buffer), and then blocked with 200 ul/well 1% BSA in PBS pH 7.4 (block buffer) for two hours at room temperature. After three washes with wash buffer, TAs and controls Lenzilumab and Elotuzumab were diluted to a concentration of 100 nM in PBS containing 1% BSA and 0.05% Tween-20 (assay buffer). The diluted material was added to the DNA/insulin coated plate at 75 ul/well for 1 hour at room temperature. After three washes with wash buffer, donkey anti-human FcY HRP conjugated polyclonal antibody, diluted to 1:5000 in assay buffer, was added to the plate at 75 ul/well for 1 hr at room temperature. After three washes with wash buffer and three washes with wash buffer (with no tween-20), the assay was developed with TMB, and stopped with 1N HCL. OD 450 nm was measured. The experiment included appropriate controls for non-specific binding of test articles to the plate/block in the absence of DNA or insulin. MIAB145 showed dsDNA polyreactivity score of 43.11, and Insulin polyreactivity score of 4.58; MIAB146 showed dsDNA polyreactivity score of 24.57, and Insulin polyreactivity score of 2.61; MIAB147 showed dsDNA polyreactivity score of 8.36, and Insulin polyreactivity score of 3.81; MIAB148 showed dsDNA polyreactivity score of 3.53, and Insulin polyreactivity score of 3.63; MIAB149 showed dsDNA polyreactivity score of 27.86, and Insulin polyreactivity score of 3.53; MIAB150 showed dsDNA polyreactivity score of 9.66, and Insulin polyreactivity score of 3.74; MIAB151 showed dsDNA polyreactivity score of 2.89, and Insulin polyreactivity score of 3.63; MIAB152 showed dsDNA polyreactivity score of 7.01, and Insulin polyreactivity score of 2.83; MIAB153 showed dsDNA polyreactivity score of 1.52, and Insulin polyreactivity score of 2.46; MIAB154 showed dsDNA polyreactivity score of 8.25, and Insulin polyreactivity score of 61.91; MIAB155 showed dsDNA polyreactivity score of 1.62, and Insulin polyreactivity score of 1.99; MIAB156 showed dsDNA polyreactivity score of 4.70, and Insulin polyreactivity score of 45.25; MIAB157 showed dsDNA polyreactivity score of 6.63, and Insulin polyreactivity score of 3.99; MIAB158 showed dsDNA polyreactivity score of 1.67, and Insulin polyreactivity score of 2.67; PRNT1 showed dsDNA polyreactivity score of 38.82, and Insulin polyreactivity score of 5.02; MIAB141 showed dsDNA polyreactivity score of 1.77, and Insulin polyreactivity score of 3.60; Elotuzumab control showed dsDNA polyreactivity score of 0.95, and Insulin polyreactivity score of 1.01; and Lenzilumab control showed dsDNA polyreactivity score of 38.04, and Insulin polyreactivity score of 7.87. No non-specific binding to DNA and insulin was seen with MIAB148, MIAB151, MIAB153, MIAB155, MIAB158 and MIAB141. MIAB148, MIAB151, MIAB153, MIAB155, MIAB158 and MIAB141 were not polyreactive.

### Example 3. Anti-MAdCAM Molecule Variants with the A34N Substitution in LCDR1 Bind Human MAdCAM

[0732] Anti-human Fc biosensors were equilibrated in assay buffer (1% BSA in 1×PBS with 0.05% Tween-20) for 10 minutes before the experiment was set-up. Test articles were diluted to 5 μg/mL in assay buffer and 200 μL pipetted to 96 well plate. Human MAdCAM was titrated down, two-fold dilutions (starting at 600 nM as the highest concentration, 7-point dilution). The experiment was run using data acquisition software version 10.0 for OCTET96 RED. Test articles were captured using anti-human Fc biosensors for 180 s. Biosensors loaded with test articles were then equilibrated in assay buffer for 120 s. Association was performed in wells with huMAdCAM for 180 seconds. Dissociation was performed in wells with assay buffer for 180 s. Kinetic parameters (kon and kdis) and dissociation constant (KD) were calculated from a 1:1 global fit model using the data analysis software of the Octet96 RED software version 10. MIAB148 showed Kd (M) of 2.69E-06, Kon (1/ms) of 1.17E+05, and Kdis (1/s) of 3.14E-01; MIAB151 showed Kd of 2.96E-06, Kon of 9.87E+04, and Kdis of 2.92E-01; MIAB153 showed Kd of 8.36E-06, Kon of 6.48E+04, and Kdis of 5.43E-01; and PRNT1 showed Kd of 1.84E-08, Kon of 5.83E+05, and Kdis of 1.07E-02. MIAB148, MIAB151, and MIAB153 bound human MAdCAM with lower affinity than the parent PRNT1 molecule.

### Example 4. MAdCAM Molecule Variants with Y105I or Y105W and A34N Mutations in the VH do not Show Non Specific Binding to DNA and Insulin

[0733] Non-specific DNA and Insulin binding is predictive of poor pharmacokinetics (PK). An immunosorbent plate was coated with dsDNA at a concentration of 1 μg/mL or Insulin at 5 μg/mL in PBS pH 7.4, 75 ul/well, and incubated overnight at 4° C. Wells were washed three times with PBS pH 7.4 containing 0.05% Tween-20 (wash buffer), and then blocked with 200 μl/well 1% BSA in PBS pH 7.4 (block buffer) for two hours at room temperature. After three washes with wash buffer, TAs and controls Lenzilumab and Elotuzumab were diluted to a concentration of 100 nM in PBS containing 1% BSA and 0.05% Tween-20 (assay buffer). The diluted material was added to the DNA/insulin coated plate at 75 μl/well for 1 hour at room temperature. After three washes with wash buffer, donkey anti-human FcY HRP conjugated polyclonal antibody, diluted to 1:5000 in assay buffer, was added to the plate at 75 μl/well for 1 hr at room temperature. After three washes with wash buffer followed by three washes with wash buffer (with no tween-20), the assay was developed with TMB, and stopped with 1N HCL. OD 450 nm was measured. The experiment included appropriate controls for non-specific binding of test articles to the plate/block in the absence of DNA or insulin. MIAB159 showed dsDNA polyreactivity score of 9.58, and Insulin polyreactivity score of 4.66; MIAB160 showed dsDNA polyreactivity score of 42.95, and Insulin polyreactivity score of 17.80; MIAB161 showed dsDNA polyreactivity score of 25.87, and Insulin polyreactivity score of 5.00; MIAB162 showed dsDNA polyreactivity score of 21.75, and Insulin polyreactivity score of 5.31; MIAB163 showed dsDNA polyreactivity score of 28.56, and Insulin polyreactivity score of 18.53; MIAB164 showed dsDNA polyreactivity score of 25.46, and Insulin polyreactivity score of 7.07; MIAB165 showed dsDNA polyreactivity score of 19.42, and Insulin polyreactivity score of 9.53; MIAB166 showed dsDNA polyreactivity score of 37.98, and Insulin polyreactivity score of 7.89; MIAB167 showed dsDNA polyreactivity score of 26.28, and Insulin polyreactivity score of 29.56; MIAB168 showed dsDNA polyreactivity score of 7.75, and Insulin polyreactivity score of 8.35; MIAB169 showed dsDNA polyreactivity score of 3.34, and Insulin polyreactivity score of 5.59; MIAB170 showed dsDNA polyreactivity score of 2.05, and Insulin polyreactivity score of 4.73; MIAB172 showed dsDNA polyreactivity score of 26.63, and Insulin polyreactivity score of 3.79; MIAB173 showed dsDNA polyreactivity score of 29.82, and Insulin polyreactivity score of 7.10; PRNT1 showed dsDNA polyreactivity score of 34.37, and Insulin polyreactivity score of 6.91; Elotuzumab control showed dsDNA polyreactivity score of 1.05, and Insulin polyreactivity score of 1.25; and Lenzilumab control showed dsDNA polyreactivity score of 44.96, and Insulin polyreactivity score of 21.31. No non-specific binding to DNA and insulin was seen with MIAB169 and MIAB170. MIAB169 and MIAB170 were not polyreactive.

### Example 5. Anti-MAdCAM Molecule Variants with the Y105I Substitution Bind Human MAdCAM

[0734] Anti-human Fc biosensors were equilibrated in assay buffer (1% BSA in 1×PBS with 0.05% Tween-20) for 10 minutes before the experiment was set-up. Test articles were diluted to 5 μg/mL in assay buffer and 200 μL pipetted to 96 well plate. Human MAdCAM was titrated down, two-fold dilutions (starting at 600 nM as the highest concentration, 7-point dilution). Experiment was run using data acquisition software version 10.0 for OCTET96 RED. Test articles were captured using anti-human Fc biosensors for 180 s. Biosensors loaded with test articles were then equilibrated in assay buffer for 120 s. Association was performed in wells with huMAdCAM for 180 seconds. Dissociation was performed in wells with assay buffer for 180 s. Kinetic parameters (kon and kdis) and dissociation constant (KD) were calculated from a 1:1 global fit model using the data analysis software of the Octet96 RED software version 10. PRNT1 showed Kd (nM) of 26.6, Kon (1/ms) of 4.16E+05, and Kdis (1/s) of 1.11E-02; MIAB169 showed Kd of 266, Kon of 2.78E+05, and Kdis of 7.38E-02; and MIAB170 showed no binding at 1 μM human MAdCAM tested. MIAB169 bound to human MAdCAM at 10 fold lower affinity than parent PRNT1.

### Example 6. MAdCAM Molecule Variants with the Y105I Substitution Bind Human and Cyno MAdCAM

[0735] Anti-human Fc biosensors were equilibrated in assay buffer (1% BSA in 1×PBS with 0.05% Tween-20) for 10 minutes before the experiment was set-up. Test articles were diluted to 5 μg/mL in assay buffer and 200 μL pipetted to 96 well plate. Human MAdCAM was titrated down, two-fold dilutions (starting at 600 nM as the highest concentration, 7-point dilution). Experiment was run using data acquisition software version 10.0 for OCTET96 RED. Test articles were captured using anti-human Fc biosensors for 180 s. Biosensors loaded with test articles were then equilibrated in assay buffer for 120 s. Association was performed in wells with huMAdCAM for 180 seconds. Dissociation was performed in wells with assay buffer for 180 s. Kinetic parameters (kon and kdis) and dissociation constant (KD) were calculated from a 1:1 global fit model using the data analysis software of the Octet96 RED software version 10. PRNT1 showed Kd (nM) of 24 in human, Kd of 13 in cyno, and biphasic Kd in mouse; MIAB169 showed Kd of 340 in human, Kd of 153 in cyno, and biphasic Kd in mouse. MIAB169 showed lower affinity to human and cyno MAdCAM than parent PRNT1.

### Example 7. MAdCAM Molecule Variants with the Y105I Mutation do not Show Non Specific Binding to DNA and Insulin Irrespective of Expression Host

[0736] An immunosorbent plate was coated with dsDNA at a concentration of 1 μg/mL or Insulin at 5 μg/mL in PBS pH 7.4, 75 μl/well, and incubated overnight at 4° C. Wells were washed three times with PBS pH 7.4 containing 0.05% Tween-20 (wash buffer), and then blocked with 200 μl/well 1% BSA in PBS pH 7.4 (block buffer) for two hours at room temperature. After three washes with wash buffer, TAs and controls Lenzilumab and Elotuzumab were diluted to 100 nM in PBS containing 1% BSA and 0.05% Tween-20 (assay buffer). The diluted material was added to the DNA/insulin coated plate at 75 μl/well for 1 hour at room temperature. After three washes with wash buffer, donkey anti-human FcY HRP conjugated polyclonal antibody, diluted to 1:5000 in assay buffer, was added to the plate at 75 μl/well for 1 hr at room temperature. After three washes with wash buffer followed by three washes with wash buffer (with no tween-20), the assay was developed with TMB, and stopped with 1N HCL. OD 450 nm was measured. The experiment included appropriate controls for non-specific binding of test articles to the plate/block in the absence of DNA or insulin. MIAB169-CHO showed dsDNA polyreactivity score of 1.65, and Insulin polyreactivity score of 3.38; MIAB169-HEK showed dsDNA polyreactivity score of 3.36, and Insulin polyreactivity score of 6.37; Elotuzumab control showed dsDNA polyreactivity score of 1.16, and Insulin polyreactivity score of 3.43; and Lenzilumab control showed dsDNA polyreactivity score of 49.51, and Insulin polyreactivity score of 69.23. No non-specific binding to DNA and insulin was seen with MIAB169 expressed in CHO or HEK cells.

### Example 8. MAdCAM Germlined Mutants Bind Human MAdCAM

[0737] Anti-human Fc biosensors were equilibrated in assay buffer (1% BSA in 1×PBS with 0.05% Tween-20) for 10 minutes before the experiment was set-up. Test articles were diluted to 5 μg/mL in assay buffer and 200 μL pipetted to 96 well plate. Human MAdCAM was titrated down, two-fold dilutions (starting at 600 nM as the highest concentration, 7-point dilution). Experiment was run using data acquisition software version 10.0 for OCTET96 RED. Test articles were captured using anti-human Fc biosensors for 180 s. Biosensors loaded with test articles were then equilibrated in assay buffer for 120 s. Association was performed in wells with huMAdCAM for 180 seconds. Dissociation was performed in wells with assay buffer for 180 s. Kinetic parameters (kon and kdis) and dissociation constant (KD) were calculated from a 1:1 global fit model using the data analysis software of the Octet96 RED software version 10. PRNT1 showed Kd (nM) of 14, Kon (1/ms) of 6.83E+05, and Kdis (1/s) of 9.55E-03; MIAB137 (HCDR2 germlined) showed Kd (nM) of 203, Kon (1/ms) of 4.04E+05, and Kdis (1/s) of 8.2E-02; MIAB136 (HCDR1 germlined), MIAB141 (LCDR1 germlined), and MIAB141 (LCDR3 germlined) showed no binding to 150 nM human MAdCAM. MIAB137 showed a reduced binding affinity to human MAdCAM compared to parental molecule, PRNT1.

[0738] In a separate experiment PRNT1 showed Kd (nM) of 26.5, Kon (1/ms) of 4.29E+05, and Kdis (1/s) of 1.14E-02; MIAB145-001 (VK: V29I) showed Kd (nM) of 22.2, Kon (1/ms) of 4.05E+05, and Kdis (1/s) of 8.97E-03; MIAB146-001 (VK: R31S) showed Kd (nM) of 43.8, Kon (1/ms) of 4.49E+05, and Kdis (1/s) of 1.97E-02; MIAB149-001 (VK: V29I) showed Kd (nM) of 68.8, Kon (1/ms) of 3.76E+05, and Kdis (1/s) of 2.59E-02; and MIAB147-001 (VK: S32Y) showed no binding to 200 nM human MAdCAM. MIAB146 and MIAB149 have reduced binding affinity to human MAdCAM compared to parental molecule, PRNT1.

[0739] In another experiment PRNT1 showed Kd (nM) of 21.2, Kon (1/ms) of 3.85E+05, and Kdis (1/s) of 8.16E-03; MIAB133-001 (VH: D31S) showed Kd (nM) of 20.00, Kon (1/ms) of 5.64E+05, and Kdis (1/s) of 1.13E-02; MIAB174-001 (VH: HCDR1: F32Y) showed Kd (nM) of 21.8, Kon (1/ms) of 4.45E+05, and Kdis (1/s) of 9.69E-03; MIAB175-001 (VH: HCDR1: D31S, F32Y) showed Kd (nM) of 22.6, Kon (1/ms) of 4.71E+05, and Kdis (1/s) of 1.06E-02; MIAB177-001 (VH: HCDR2: I48V, Y50A, D54S, S55G, Y57S, N59Y) showed Kd (nM) of 218, Kon (1/ms) of 3.91E+05, and Kdis (1/s) of 8.51E-02; and MIAB178-001 (VH: HCDR1: D31S, F32Y; HCDR2: Y50A, D54S, Y57S, N59Y) showed Kd (nM) of 519, Kon (1/ms) of 3.72E+05, and Kdis (1/s) of 2.20E-01. MIAB177 and MIAB178 have reduced affinity to MAdCAM compared to parental molecule, PRNT1.

[0740] In another experiment PRNT1 showed Kd (nM) of 14.8, Kon (1/ms) of 3.96E+05, and Kdis (1/s) of 5.86E-03; MIAB182-001 (HCDR1: D31S, F32Y; HCDR2: I48V, Y50A, D54S, S55G, Y57S, N59Y; VK: V29I) showed Kd (nM) of 119, Kon (1/ms) of 2.26E+05, and Kdis (1/s) of 2.67E-02; MIAB183-001 (HCDR1: D31S, F32Y; HCDR2: I48V, Y50A, D54S, S55G, Y57S, N59Y; VK: R31S) showed Kd (nM) of 362, Kon (1/ms) of 1.66E+05, and Kdis (1/s) of 5.99E-02; MIAB184-001 (HCDR1: D31S, F32T; HCDR2: I48V, Y50A, D54S, S55G, Y57S, N59Y; VK: V29I, R31S) showed Kd (nM) of 563, Kon (1/ms) of 1.45E+05, and Kdis (1/s) of 8.18E-02. Germling heavy chain with V29I reduced MAdCAM affinity by 10-fold, germling heavy chain with R31S reduced MAdCAM affinity by 20-fold, and germling heavy chain and light chain reduced MAdCAM affinity by 40-fold.

### Example 9. MIAB197 is Stable for 1 Month at 4 C and 37 C

[0741] MIAB197 in acetate buffer was concentrated to 5 mg/mL using spin columns. Samples were collected at various concentrations and analyzed by size exclusion chromatography on an Agilent BioAdvance SEC 300 A column. MIAB197 at 5 mg/mL was incubated at 4 and 37 C for up to 28 days to analyze molecule stability over time. Samples were collected at various time points and analyzed by size exclusion chromatography on an Agilent BioAdvance SEC 300 A column. No concentration dependent aggregation was observed with MIAB197 when concentrated up to 5 mg/mL in optimized acetate buffer as seen by analytical SEC. MIAB197 at concentration of 5 mg/mL remained stable with no loss of main peak or appearance of high or low molecular weight species at 4 C and 37 C for 1 month.

### Example 10. MIAB197 has Favorable Thermal Stability

[0742] The anti-PD-1-MAdCAM antibodies were analyzed by the Nano DSC system (TA Instrument) to determine melting temperature (Tm). A temperature ramp of 1° C./min was performed with monitoring from 25° C. to 100° C. Thermograms of the blank buffer were subtracted from each antibody prior to analysis and the Tm values were calculated after deconvolution using the Nano DSC software. PRNT1 showed Tm (C) peak 1 of 64.5, peak 2 of 81.7, and peak 3 of 83.8; MIAB197 showed Tm peak 1 of 69.8, peak 2 of 81.7, and peak 3 of 84. MIAB197 has favorable thermal stability.

### Example 11. MIAB197 has Desirable Characteristics for Development

[0743] To characterize the identity and purity of the anti-PD-1-MAdCAM antibodies, the anti-PD-1-MAdCAM antibodies were prepared in reducing labeling buffer before being analyzed on the LabChip GXII system (PerkinElmer). rCE SDS revealed PRNT1 to comprise 26.5% light chain and 71.6% heavy chain; and MIAB197 to comprise 28.47% light chain and 71.53% heavy chain. MIAB197 has good characteristics for development.

### Example 12. MIAB197 has Isoelectric Point Compatible with Manufacturing

[0744] The anti-PD-1-MAdCAM antibodies were was diluted in a matrix of methyl cellulose, 4 M urea, 3-10 pharmalytes (4%), 5 mM Arginine, and pI markers (indicated below). The mixture was submitted to an iCE3 IEF Analyzer (ProteinSimple) and pre-focused at 1,500 V followed by focusing at 3,000 V. The isoelectric points of each peak were calculated from the bracketing pI markers. Capillary isoelectric focusing (cIEF) showed isoelectric peaks of 7.72 with peak area (%) of 0.60, 7.82 with peak area of 1.94, 7.96 with peak area of 5.98, 8.11 with peak area of 10.52, 8.24 with peak area of 32.43, 8.33 with peak area of 22.95, 8.39 with peak areak of 12.56, 8.44 with peak area of 5.21, and 8.54 with peak area of 7.81 for PRNT1; and isoelectric peaks of 8.55 with peak area (%) of 3.63, 8.60 with peak area of 8.66, 8.69 with peak area of 18.38, 8.72 with peak area of 28.79, and 8.76 with peak area of 40.54 for MIAB197. The data demonstrate that the isoelectric peaks for MIAB197 were all above pH 8.5, with ˜70% at pI of 8.7 which is favorable for manufacturability

### Example 13. MIAB204 does not Show Non Specific Binding to DNA and Insulin

[0745] Non-specific DNA and Insulin binding is predictive of poor pharmacokinetics (PK). An immunosorbent plate was coated with dsDNA at a concentration of 1 μg/mL or Insulin at 5 μg/mL in PBS pH 7.4, 75 μl/well, and incubated overnight at 4° C. Wells were washed three times with PBS pH 7.4 containing 0.05% Tween-20 (wash buffer), and then blocked with 200 μl/well 1% BSA in PBS pH 7.4 (block buffer) for two hours at room temperature. After three washes with wash buffer, TAs and controls Lenzilumab and Elotuzumab were diluted to 100 nM in PBS containing 1% BSA and 0.05% Tween-20 (assay buffer). The diluted material was added to the DNA/insulin coated plate at 75 μl/well for 1 hour at room temperature. After three washes with wash buffer, donkey anti-human FcY HRP conjugated polyclonal antibody, diluted to 1:5000 in assay buffer, was added to the plate at 75 μl/well for 1 hr at room temperature. After three washes with wash buffer followed by three washes with wash buffer (with no tween-20), the assay was developed with TMB, and stopped with 1N HCL. OD 450 nm was measured. The experiment included appropriate controls for non-specific binding of test articles to the plate/block in the absence of DNA or insulin. MIAB204 showed dsDNA polyreactivity score of 1.66, and Insulin polyreactivity score of 8.43; Elotuzumab control showed dsDNA polyreactivity score of 1.16, and Insulin polyreactivity score of 3.43; and Lenzilumab control showed dsDNA polyreactivity score of 49.51, and Insulin polyreactivity score of 69.23. MIAB204 is not polyreactive.

### Example 14. MIAB204 has Favorable Thermal Stability

[0746] The anti-PD-1-MAdCAM antibodies were submitted to the Nano DSC system (TA Instrument) for analysis. A temperature ramp of 1° C./min was performed with monitoring from 25° C. to 100° C. Thermograms of the blank buffer were subtracted from each antibody prior to analysis and the Tm values were calculated after deconvolution using the Nano DSC software. PRNT1 showed Tm (C) peak 1 of 64.5, peak 2 of 81.7, and peak 3 of 83.8; MIAB204 showed Tm peak 1 of 65.4, peak 2 of 69.5, and peak 3 of 84.4. MIAB204 has favorable thermal stability.

### Example 15. MIAB204 has Desirable Characteristics for Development

[0747] To characterize the identity and purity of the anti-PD-1-MAdCAM antibodies, the anti-PD-1-MAdCAM antibodies were prepared in reducing labeling buffer before being submitted to the LabChip GXII system (PerkinElmer). rCE SDS revealed PRNT1 to comprise 26.5% light chain and 71.6% heavy chain; and MIAB204 to comprise one peak comprising 80.64% and second peak comprising 19.36% of the sample. MIAB204 showed different O-glycan occupancies. MIAB204 showed sufficient purity and composition identity for development.

### Example 16. MIAB204 has Isoelectric Point Compatible with Manufacturing

[0748] The sample was diluted in a matrix of methyl cellulose, 4 M urea, 3-10 pharmalytes (4%), 5 mM Arginine, and pI markers (indicated below). The mixture was submitted to an iCE3 IEF Analyzer (ProteinSimple) and pre-focused at 1,500 V followed by focusing at 3,000 V. The isoelectric points of each peak were calculated from the bracketing pI markers. Capillary isoelectric focusing (cIEF) showed isoelectric peaks of 7.72 with peak area (%) of 0.60, 7.82 with peak area of 1.94, 7.96 with peak area of 5.98, 8.11 with peak area of 10.52, 8.24 with peak area of 32.43, 8.33 with peak area of 22.95, 8.39 with peak area of 12.56, 8.44 with peak area of 5.21, and 8.54 with peak area of 7.81 for PRNT1; and isoelectric peaks of 7.59 with peak area (%) of 2.92, 7.84 with peak area of 5.94, 8.00 with peak area of 14.88, 8.19 with peak area of 18.64, 8.29 with peak area of 5.80, 8.33 with peak area of 10.73, 8.38 with peak area of 22.13, 8.43 with peak area of 14.04, and 8.48 with peak area of 4.92 for MIAB204. Isoelectric peaks for MIAB204 show heterogeneity with most peaks having the pI greater than 8. MIAB204 is considered good for manufacturing.

### Example 17. V69A and Q74P Substitutions in the IL-2 Mutein are Beneficial in Improving Solubility of the Molecule

[0749] The pTT5 vectors containing the full length IgG1 heavy with C-terminally fused human IL-2 mutant and light chain encoding MIAB211 (control IgG1 mAb) were co-transfected at equimolar ratios into HEK cells. After 5-7 days, cell culture supernatants expressing MIAB211 (control IgG1 mAb) were harvested, and clarified by centrifugation and filtration through a 0.22 um filtration device. MIAB211, was captured on Mab Select column. The column was washed with PBS pH 7.4 and the captured protein was eluted using 0.1M glycine pH 2.5, with neutralization using a tenth volume of 1M Tris pH 8.0. The protein was buffer exchanged into PBS pH 7.4, and analyzed by size exclusion chromatography on an Agilent BioAdvance SEC 300 A column. MIAB211 (control IgG1 mAb) was aggregated with only 67% monodispersed after ProA purification as shown by size exclusion chromatography. Additional polishing procedures like cation exchange improved the monodispersity to 86% which is not suitable for assays. V69A and Q74P are beneficial in improving solubility of molecule.

### Example 18. Germline Single Mutants Bind to Human PD-1

[0750] Anti-human IgG Fc (AHC) biosensors were equilibrated in assay buffer for 20 minutes. Test article was diluted to 10 μg/mL in assay buffer (ix PBS, 1% BSA, 0.05% Tween20). A seven-point serial dilution of human PD-1 was prepared in assay buffer, starting at 1000 nM down to 15.625 nM. Test article was loaded on tips for 180 s followed by a 240 s association phase with MAdCAM and 240 s dissociation phase in assay buffer. PMAB134 bound to human PD-1 with the Kd (nM) of 6; Kon of 1.2e5, and Koff of 6.7E-4; PMAB135 bound to human PD-1 with the Kd (nM) of 3; Kon of 1.1E5, and Koff of 3.3E-4; PMAB136 bound to human PD-1 with the Kd (nM) of 36; Kon of 8.3E4, and Koff of 2.9E-3; PMAB137 did not bind to human PD-1; PMAB138 bound to human PD-1 with the Kd (nM) of 53; Kon of 1.3E5, and Koff of 6.9E-3; PMAB139 bound to human PD-1 with the Kd (nM) of 50; Kon of 1.3E5, and Koff of 6.3E-3; PMAB140 bound to human PD-1 with the Kd (nM) of 22; Kon of 9.9E4, and Koff of 2.2E-3; PMAB141 did not bind to human PD-1; PMAB142 bound to human PD-1 with the Kd (nM) of 33; Kon of 6.4E4, and Koff of 2.1E-3; PMAB143 bound to human PD-1 with the Kd (nM) of 17; Kon of 9.3E4, and Koff of 1.6E-3; PMAB144 did not bind to human PD-1; PMAB145 did not bind to human PD-1. Germlined PD-1 agonists comprising single mutations bound to human PD-1.

### Example 19. Germline Mutants Bind to Human PD-1

[0751] Anti-human IgG Fc (AHC) biosensors were equilibrated in assay buffer for 20 minutes. Test article was diluted to 10 μg/mL in assay buffer (1×PBS, 1% BSA, 0.05% Tween20). A seven-point serial dilution of human PD-1 was prepared in assay buffer, starting at 1000 nM down to 15.625 nM. Test article was loaded on tips for 180 s followed by a 180-240 s association phase with PD-1 and 240 s dissociation phase in assay buffer. PMAB134 bound to human PD-1 with the Kd(M) of 1.16E-08; Kon of 6.97E+04, and Kdis of 8.07E-04; PMAB1A did not bind to human PD-1; PMAB189 did not bind to human PD-1; PMAB175 bound to human PD-1 with the Kd(M) of 7.71E-08, Kon of 3.77E+04, and Kdis of 2.91E-03; PMAB176 bound to human PD-1 with the Kd(M) of 8.94E-07; Kon of 6.18E+04, and Kdis of 5.53E-02; PMAB177 bound to human PD-1 with the Kd(M) of 8.09E-07; Kon of 8.16E+04, and Kdis of 6.60E-02; PMAB178 bound to human PD-1 with the Kd(M) of 1.30E-06; Kon of 4.74E+04, and Kdis of 6.15E-02; PMAB179 did not bind to human PD-1; PMAB182 did not bind to human PD-1; PMAB183 bound to human PD-1 with the Kd(M) of 1.13E-05; Kon of 2.97E+04, and Kdis of 3.34E-01; PMAB184 did not bind to human PD-1. Germlined PD-1 agonists comprising mutations bound to human PD-1. Germlined PD-1 agonists comprising mutations in the CDR2 did not bind human PD-1.

### Example 20. Germline and Hydrophobic Patch Mutants Bind to Human PD-1

[0752] Anti-human IgG Fc (AHC) biosensors were equilibrated in assay buffer for 20 minutes. Test article was diluted to 10 μg/mL in assay buffer (ix PBS, 1% BSA, 0.05% Tween20). A seven-point serial dilution of human PD-1 was prepared in assay buffer, starting at 1000 nM down to 15.625 nM. Test article was loaded on tips for 180 s followed by a 180-240 s association phase with PD-1 and 240 s dissociation phase in assay buffer. PMAB134 bound to human PD-1 with the Kd (nM) of 1.11E-08, Kon of 5.86E+04, and Koff of 6.51E-04; PMAB194 bound to human PD-1 with the Kd (nM) of 5.77E-07, Kon of 2.17E+04, and Koff of 1.25E-02; PMAB195 bound to human PD-1 with the Kd (nM) of 6.51E-07, Kon of 3.49E+04, and Koff of 2.27E-02; PMAB198 bound to human PD-1 with the Kd (nM) of 1.04E-07, Kon of 3.46E+04, and Koff of 3.59E-03; PMAB199 bound to human PD-1 with the Kd (nM) of 9.86E-08, Kon of 3.40E+04, and Koff of 3.36E-03. Accordingly, PD-1 agonists comprising germline and hydrophobic patch mutations bind to human PD-1.

### Example 21. PD-1 Agonists Comprising Germline Single Mutations Bind to Human PD-1

[0753] Anti-human IgG Fc (AHC) biosensors were equilibrated in assay buffer for 20 minutes. Test article was diluted to 10 μg/mL in assay buffer (ix PBS, 1% BSA, 0.05% Tween20). A seven-point serial dilution of human PD-1 was prepared in assay buffer, starting at 1000 nM down to 15.625 nM. Test article was loaded on tips for 180 s followed by a 240 s association phase with MAdCAM and 240 s dissociation phase in assay buffer. PMAB119 bound to human PD-1 with the Kd (nM) of 96.9, Kon of 1.50E+05, and Koff of 1.45E-02; PMAB108 bound to human PD-1 with the Kd (nM) of 55.3, Kon of 1.16E+05, and Koff of 6.40E-03; PMAB109 bound to human PD-1 with the Kd (nM) of 85.9, Kon of 4.31E+04, and Koff of 3.70E-03; PMAB110 showed inconclusive binding kinetics; PMAB111 bound to human PD-1 with the Kd (nM) of 67.6, Kon of 1.06E+05, and Koff of 7.18E-03; PMAB112 bound to human PD-1 with the Kd (nM) of 76.2, Kon of 9.45E+04, and Koff of 7.20E-03; PMAB113 bound to human PD-1 with the Kd (nM) of 91.7, Kon of 1.74E+05, and Koff of 1.59E-02; PMAB114 bound to human PD-1 with the Kd (nM) of 113, Kon of 1.03E+05, and Koff of 1.16E-02; PMAB115 bound to human PD-1 with the Kd (nM) of 229, Kon of 4.22E+04, and Koff of 9.66E-03; PMAB116, PMAB117, and PMAB118 showed inconclusive binding kinetics. PD-1 agonists comprising germline single mutations bind to human PD-1.

### Example 22. PD-1 Agonists Comprising Mutations in Variable Domains Bind to Human PD-1

[0754] Plates were coated with 2 μg/mL huPD-1 in 1×PBS at 4° C. overnight. Plates were blocked with 1×PBS with 1% BSA. Antibodies were tested in duplicate for binding with a 3-fold, dilution series from 50 nM to 0.07 nM. Signal is background subtracted for coated wells with 2° antibody only. PMAB244, PMAB245, PMAB246, and PMAB247 comprised mutations in the variable heavy domain and showed binding to human PD-1. PMAB247 comprised double mutations in the variable heavy domain and showed reduced binding to human PD-1. PMAB244, PMAB249, PMAB250, PMAB251, PMAB252, PMAB253, PMAB254, PMAB258, PMAB256, PMAB259, PMAB255, PMAB257, PMAB248, PMAB260, PMAB264, PMAB265, PMAB266, PMAB267, PMAB268, PMAB269, PMAB270, PMAB271, PMAB272, PMAB273, PMAB261, PMAB262, and PMAB263 comprised mutations in the variably light chain and showed binding to human PD-1. PD-1 agonists comprising mutations in the variably heavy or light chain bind human PD-1.

### Example 23. PD-1 Agonists Comprising Germline Mutations Bind to Human PD-1

[0755] Plates were coated with 2 μg/mL huPD-1 in 1×PBS at 4° C. overnight. Plates were blocked with 1×PBS with 1% BSA. Antibodies were tested in duplicate for binding with a 3-fold, dilution series from 300 nM to 0.4 nM. Signal is background subtracted for coated wells with 2° antibody only. PMAB244 bound to human PD-1 with the IC50 (nM) of 258.1; PND00915 bound to human PD-1 with the IC50 (nM) of 18.94; PMAB233 bound to human PD-1 with the IC50 (nM) of 85.87; PMAB234 bound to human PD-1 with the IC50 (nM) of 28.08; PMAB235 bound to human PD-1 with the IC50 (nM) of 23.18; PND00919 bound to human PD-1 with the IC50 (nM) of 23.2; PMAB237 bound to human PD-1 with the IC50 (nM) of 15.87; PMAB238 bound to human PD-1 with the IC50 (nM) of 36.37; PMAB239 bound to human PD-1 with the IC50 (nM) of 44.72; PMAB240 bound to human PD-1 with the IC50 (nM) of 39.04; PMAB241 bound to human PD-1 with the IC50 (nM) of 46.44; PMAB242 bound to human PD-1 with the IC50 (nM) of 30.57; PMAB243 bound to human PD-1 with the IC50 (nM) of 40.74. PD-1 agonists comprising germline mutations bind to human PD-1.

### Example 24. PMAB274, PMAB275, PMAB276, PMAB277, and PMAB278 Bind to Human PD-1

[0756] Anti-human IgG Fc (AHC) biosensors were equilibrated in assay buffer for 20 minutes. Test article was diluted to 10 μg/mL in assay buffer (ix PBS, 1% BSA, 0.05% Tween20). A seven-point serial dilution of human PD-1 was prepared in assay buffer, starting at 1000 nM down to 15.625 nM. Test article was loaded on tips for 180 s followed by a 120 s association phase with PD-1 and 180 s dissociation phase in assay buffer. PMAB274 bound human PD-1 with the Kd (nM) of 1.79E-06, Kon of 2.04E+04, and Koff of 3.65E-02; PMAB275 bound human PD-1 with the Kd (nM) of 8.49E-07, Kon of 9.78E+04, and Koff of 8.30E-02; PMAB276 bound human PD-1 with the Kd (nM) of 9.85E-07, Kon of 3.81E+04, and Koff of 3.75E-02; PMAB277 bound human PD-1 with the Kd (nM) of 8.96E-07, Kon of 4.48E+04, and Koff of 4.01E-02; PMAB278 bound human PD-1 with the Kd (nM) of 8.92E-07, Kon of 2.29E+04, and Koff of 2.05E-02.

### Example 25. PD-1 Agonists Bind to Human PD-1

[0757] Anti-human IgG Fc (AHC) biosensors were equilibrated in assay buffer for 20 minutes. Test article was diluted to 10 μg/mL in assay buffer (ix PBS, 1% BSA, 0.05% Tween20). A seven-point serial dilution of human PD-1 was prepared in assay buffer, starting at 1000 nM down to 15.625 nM. Test article was loaded on tips for 180 s followed by a 240 s association phase with PD-1 and 240 s dissociation phase in assay buffer. PMAB217 bound to human PD-1 with the Kd (nM) of 4.24E-07, Kon of 3.31E+05, and Koff of 1.40E-01; PMAB201 bound to human PD-1 with the Kd (nM) of 3.41E-07, Kon of 2.58E+05, and Koff of 8.78E-02; PMAB202 bound to human PD-1 with the Kd (nM) of 7.55E-07, Kon of 1.79E+05, and Koff of 1.35E-01; PMAB204 bound to human PD-1 with the Kd (nM) of 1.71E-06, Kon of 9.99E+04, and Koff of 1.71E-01; PMAB205 bound to human PD-1 with the Kd (nM) of 7.95E-07, Kon of 1.91E+05, and Koff of 1.52E-01; PMAB207 bound to human PD-1 with the Kd (nM) of 4.45E-07, Kon of 1.97E+05, and Koff of 8.76E-02; PMAB208 bound to human PD-1 with the Kd (nM) of 5.53E-07, Kon of 2.71E+05, and Koff of 1.50E-01; PMAB209 bound to human PD-1 with the Kd (nM) of 6.87E-07, Kon of 2.08E+05, and Koff of 1.43E-01; PMAB210 bound to human PD-1 with the Kd (nM) of 3.13E-06, Kon of 7.57E+04, and Koff of 2.37E-01; PMAB211 bound to human PD-1 with the Kd (nM) of 1.30E-06, Kon of 1.54E+05, and Koff of 2.00E-01; PMAB212 bound to human PD-1 with the Kd (nM) of 1.09E-06, Kon of 1.43E+05, and Koff of 1.56E-01; PMAB213 bound to human PD-1 with the Kd (nM) of 1.43E-06, Kon of 1.24E+05, and Koff of 1.78E-01; PMAB214 bound to human PD-1 with the Kd (nM) of 8.05E-06, Kon of 3.26E+04, and Koff of 2.63E-01. Accordingly, PD-1 agonists comprising germline single mutations bind human PD-1.

### Example 26. PMAB65 Shows Expected Molecular Weight and Diameter in CE-SDS, SEC-MALS, and DLS, Respectively

[0758] PMAB65 was subjected to CE-SDS, SEC-MALS, and DLS in order to assess its molecular weight and diameter. The sample was prepared in nonreducing or reducing labeling buffer before being submitted to the LabChip GXII system (PerkinElmer). PMAB65 in nonreducing buffer showed peak 1 of 188.02 kDa and area of 0.99%, and peak 2 of 213.9 kDa and area of 99.01%. PMAB65 in reducing buffer showed peak 1 of 28.8 kDa and area of 24.33%, and peak 2 of 93.13 kDa and area of 75.67%.

[0759] Next, in SEC-MALS analysis 20 μL of PMAB65 was injected onto Zenix SEC-300 column and eluted for 10 minutes at 0.35 mL/min. Predicted size of PMAB65 was 199.6 kDa, and the data showed molecular weight of 204.5 kDa±7.24%, and glycan molecular weight of 20.9 kDa±78.7%.

[0760] Using DLS PMAB65 showed molecule diameter of 15 nm which was as expected of a IgG-HC-scFv antibody. Accordingly, PMAB65 shows expected monodispersed molecular weight and diameter.

### Example 27. PMAB65 has Low Polyreactive Binding to Nonspecific Antigens

[0761] Plates were coated with polyreactivity antigen (ssDNA=1 μg/ml; dsDNA=1 μg/ml; KLH=5 μg/ml; insulin=5 μg/ml; LPS=10 μg/ml; cardiolipin=50 μg/ml) in 1×PBS at 4° C. overnight. Plates were blocked with 1×PBS with 1% BSA. PMAB65, PMAB1B (negative control), and PMAB1C (positive control) antibodies were tested in triplicate for binding at 100 nM. Antibody binding was detected by Anti-Kappa-HRP antibody, signal is background subtracted for coated wells with 2° antibody only. PMAB65 showed low polyreactivity against all tested antigens as compared to control antibodies. Accordingly, PMAB65 has low polyreactivity.

### Example 28. PMAB65 has as Predicted Empirical and Theoretical Mass

[0762] PMAB65 sample was denatured and/or reduced by guanidine and DTT and then deglycosylated by PNGase F (MEDNA Bio M3104). The sample was analyzed by Waters ACQUITY UPLC coupled to Xevo G2-XS QTOF mass spectrometer using an ACQUITY UPLC Protein BEH SEC column. Glycosylated conditions assume glycosylation weight of G0F (1445 Da). Nonreduced condition assumes disulfide-bond weight of −2 Da per disulfide (20 disulfide-bonds). PMAB65 in non-reduced glycosylated form had expected molecular weight of 202420 Da and empirical molecular weight of 202418 Da. PMAB65 in non-reduced deglycosylated form had expected molecular weight of 199536 Da and empirical molecular weight of 199530 Da. PMAB65 in reduced glycosylated form had expected molecular weight of 76975 Da (G0F) and 24258 Da; and empirical molecular weight of 76976 Da and 24248 Da. PMAB65 in reduced deglycosylated form had expected molecular weight of 75530 Da and 24258 Da, and empirical molecular weight of 75530 Da and 24248 Da. Empirically determined masses for PMAB65 align with the expected mass for each condition.

### Example 29. PMAB65 Exhibits Minimal Chemical Modifications Under Stress

[0763] In order to create deamidation stress conditions, PMAB65 was buffer exchanged into 20 mM Tris, 10 mM EDTA, pH 8.5 or control buffer and incubated for 1 week at 37° C. before snap freezing and storage at −80° C. until preparation for mass spectrometry analysis. To create oxidation stress conditions, PMAB65 was adjusted to 1 mM 2,2′-azobis(2-amidinopropane) dihydrochloride from a 100 mM stock or an equal volume of water for control condition and incubated at 37° C. for 24 hours. After incubation, samples were buffer exchanged into control buffer, snap frozen, and stored at −80° C. until preparation for mass spectrometry analysis. Samples were treated with DTT and IAM, followed by trypsin/Lys-C digestion. The digested sample was then analyzed by Waters ACQUITY UPLC coupled to Xevo G2-XS QTOF mass spectrometer using a Protein BEH C18 column. Data showed minimal modifications in the variable domains CDR3 of the scFv moiety. PMAB65 shows favorable properties for manufacturing.

### Example 30. PMAB65 Binds to Human and Cynomolgus PD-1 and Human, Cynomolgus, and Mouse MAdCAM

[0764] Anti-human IgG Fc (AHC) biosensors were equilibrated in assay buffer for 20 minutes. Test article was diluted to 10 μg/mL in assay buffer (lx PBS, 1% BSA, 0.05% Tween20). A seven-point serial dilution of human and cynomolgus PD-1 or human, cynomolgus and mouse MAdCAM was prepared in assay buffer, starting at 1000 nM down to 15.625 nM. For PD-1 binding, test article was loaded on tips for 180 s followed by a 180 s association phase with PD-1 and 240 s dissociation phase in assay buffer. For MAdCAM binding, test article was loaded on tips for 180 s followed by a 120 s association phase with MAdCAM and 180 s dissociation phase in assay buffer. Fab moiety of the PMAB65 comprising PD-1 bound to human PD-1 with the Kd of 32.6 nM; cyno PD-1 with the Kd of 30.3 nM; and did not bind mouse PD-1. scFv moiety of the PMAB65 comprising MAdCAM bound to human MAdCAM with the Kd of 75.5 nM; cyno MAdCAM with the Kd of 24.3 nM; and mouse MAdCAM with the Kd of 269 nM. Accordingly, PMAB65 binds human, cyno, and mouse PD-1 and MAdCAM.

### Example 31. PMAB65 Shows Specific Binding to MAdCAM and PD-1 on Human Protein Array (Retrogenix)

[0765] Over 6000 expression vectors, encoding both ZsGreen1 and full-length human plasma membrane proteins or a cell-surface tethered human secreted protein, were arrayed in duplicate across 16 microarray slides. Human HEK293 cells were used for reverse transfection/expression. The test antibodies were added to each slide after cell fixation. Detection of binding was performed by using the same fluorescent secondary antibody as used in the Pre-screen. Fluorescent images were analyzed and quantitated (for transfection) using ImageQuant software. A protein ‘hit’ is defined as a duplicate spot showing a raised signal compared to background levels. This is achieved by visual inspection using the images gridded on the ImageQuant software. Hits were classified as ‘strong, medium, weak or very weak’, depending on the intensity of the duplicate spots. PMAB65 was found to specifically interact with its two primary targets only −PDCD1 (medium/strong) and MADCAM1 (strong) only. No other significant interactions were detected. These results demonstrate that the bi-specific molecule is able to bind to its respective targets, with no unwanted off-target binding.

### Example 32. PMAB65 Shows Good Storage Stability

[0766] Test article was concentrated to ˜30 mg/mL and incubated at 4° C. and 37° C. for up to 28 days. Approximately 15 μg of test article was injected onto AdvanceBio SEC-300A column and eluted for 10 minutes at 0.35 mL/min. PMAB65 was formulated in: a) NaOAc pH 5; b) NaOAc pH 6; and c) NaPO4 pH 7. Stability was calculated as % POI and showed 97.9% in a), 97.5% in b), and 96.6 in c) on day 0; 96.9% in a), 93.8% in b), and 95.9 in c) on day 3; 96.4% in a), 94.2% in b), and 95.8 in c) on day 7; 95.9% in a), 94.2% in b), and 95.5% in c) on day 14; 95.7% in a), 94.1% in b), and 95.5 in c) on day 21; and 95.7% in a), 94.2% in b), and 95.5% in c) on day 28. PMAB65 was stable at 4° C. up to 28 days at approximately 22-25 mg/ml in sodium acetate or phosphate buffers, and showed minimal aggregation. Slight degradation over time was evident in the accelerated storage conditions at 37° C.

### Example 33. PMAB65 Shows Good Thermal Stability

[0767] The sample was submitted to the Nano DSC system (TA Instrument) for analysis. A temperature ramp of 1° C./min was performed with monitoring from 25° C. to 100° C. The Tm values were calculated after deconvolution using the Nano DSC software. PMAB65 showed Tm1 of 61.6° C.; Tm2 of 67.1° C.; Tm3 of 81.6° C.; and Tm4 of 82.9° C.

[0768] Next, test article intrinsic fluorescence was measured from 25-95° C. with a 1° C./min increase. Tm was calculated from local maxima of the 1st order differential equation and Tagg were measured by absorbance at 266 and 473 nm. PMAB65 showed Tm1 of 61.86° C. and Tm4 of 82.38° C.; and Tagg266 and Tagg473 of approximately 80° C. PMAB65 shows good thermal stability and low aggregation risk.

### Example 34. PMAB65 and Other PD-1 Bispecific Molecules Show No Immunogenic Epitopes in Silico

[0769] Immunogenicity of PMAB65 and other PD-1 bispecific molecules was assessed in silico according to standard methods, and showed no immunogenic epitopes in Fab or scFv CDRs.

### Example 35. PMAB65 has Low Viscosity and Shows Little Concentration-Dependent Increase in Viscosity

[0770] Test article concentrated to 24 mg/mL was used to generate a 6-point, 2-fold serial dilution to 0.75 mg/mL. Test article combined with 100 nm nanospheres was measured for dynamic light scattering to determine change in viscosity. PMAB65 showed little concentration dependent increase in viscosity.

### Example 36. PMAB65 has Improved Concentration Dependent Aggregation Properties

[0771] PMAB134, PMAB197, and PMAB65 molecules were affinity purified and buffer exchanged into phosphate buffer, pH 7.0 containing 8.5% sucrose and 100 mM NaCl. Each antibody was then concentrated using a centrifugal concentrator with samples taken at the indicated concentrations for analysis by analytical SEC. PMAB65 showed improved concentration dependent aggregation.

### Example 37. PMAB65 and PMAB197 have Decreased Polyreactivity

[0772] Plates were coated with 1% Baculovirus particle (BVP) or HEK293 cell lysate (HCL) in carbonate buffer pH 9.5, 4° C. overnight. Plates were blocked with 1×PBS with 2% BSA. PMAB134, PMAB197, and PMAB65 were tested in triplicate for binding to BVP or HCL at 150, 50, 16.7 and 5.6 μg/mL. Signal was normalized to background signal (coated wells with secondary antibody only). PMAB197 and PMAB65 showed reduced polyreactive binding to BVP or HCL at 50 μg/ml or 16.7 μg/ml. Accordingly, PMAB197 and PMAB65 have decreased polyreactivity.

### Example 38. PMAB65 and PMAB197 Have Decreased Isoelectric Point

[0773] PMAB134, PMAB197, and PMAB65 were each diluted in a matrix of methyl cellulose, 4 M urea, 3-10 pharmalytes (4%), 5 mM Arginine, and pI markers (indicated below). The mixture was submitted to an iCE3 IEF Analyzer (ProteinSimple) and pre-focused at 1,500 V followed by focusing at 3,000 V. The isoelectric points of each peak were calculated from the bracketing pI markers. icIEF analysis showed charge variant species ranging from approximately 8.0-9.0 compatible with platform manufacturing processes. PMAB197 and PMAB65 have decreased isoelectric point as compared to the parental molecule, PMAB134.

### Example 39. PMAB134, PMAB65, PMAB129, and PMAB61 do not have PD-1 Antagonist Activity

[0774] In separate experiments, PD-1 reporter Jurkat cells were incubated with Pembrolizumab, PMAB134, or PMAB65; or Pembrolizumab, PMAB129, or PMAB61 at concentrations ranging from 0.001 to 100 nM for 1 hour. PD-L1 expressing cells were then added and SHP-2 recruitment was assessed after 2 hours. PMAB134, PMAB65, PMAB129, and PMAB61 showed no antagonist activity. Accordingly, PMAB134, PMAB65, PMAB129, and PMAB61 do not have antagonist activity.

### Example 40. PD-1 Molecules have Agonist Activity

[0775] In separate experiments, plates were coated with anti-human IgG, blocked, and PMAB1D, CC-90006, or PMAB65; or PMAB1D, CC-90006, or PMAB61 were added at concentrations ranging from 0.001 to 100 nM for 1 hour. Plates were washed and PD-1 reporter Jurkat cells were added. SHP-2 recruitment was assessed after 2 hours. Ig-tethered PMAB1D did not show agonist activity; Ig-tethered CC-90006 showed agonist activity with EC50 (nM) of 2.942; and Ig-tethered PMAB65 showed agonist activity with EC50 (nM) of 3.044. In another experiment, Ig-tethered PMAB1D did not show agonist activity; Ig-tethered CC-90006 showed agonist activity with EC50 (nM) of 2.588; and Ig-tethered PMAB61 showed agonist activity with EC50 (nM) of 4.446.

[0776] MAdCAM-expressing CHO cells were allowed to adhere and form a monolayer. PMAB1D, PMAB1E, PMAB65, or PMAB61 were added at concentrations ranging from 0.001 to 100 nM and allowed to bind for 1 h at 37 C. All wells were washed, and PD-1 reporter Jurkat cells were added. Jurkat cells were incubated with test article loaded CHO cells for 2 h at 37 C. PMAB1D showed no agonist activity; PMAB1E showed agonist activity with EC50 (nM) of less than 100; PMAB65 showed agonist activity with EC50 (nM) of 0.7802; and PMAB61 showed agonist activity with EC50 (nM) of 3.023. Ig-tethered or MAdCAM bound optimized PD-1 have agonist activity.

### Example 41. PD-1 Molecules have No Detectable Soluble Agonist Activity

[0777] PD-1 reporter Jurkat cells were incubated with PMAB1D, Positive Control, PMAB65, or PMAB61 at concentrations ranging from 0.001 to 100 nM. SHP-2 recruitment was assessed after 24 hours. PMAB1D, PMAB65, and PMAB61 showed no soluble agonist activity.

### Example 42. PMAB65 Prolongs Survival in xGVHD

[0778] Xenogeneic graft versus host disease was induced by the transfer of human PBMC into immunodeficient mice. Beginning 10 days after cell transfer, mice were treated subcutaneously every 3 weeks with PMAB65 or vehicle. Data were representative of 2 studies including 5 donors. Mice treated with PMAB65 showed improved survival of 64 days (median) as compared to control (41 days, median). PMAB65 improves survival in xGVHD.

### Example 43. PMAB65 is Detectable in Gut Tissue

[0779] Balb/c mice were subcutaneously dosed with 1 mg/kg of PMAB65. Serum samples were collected at within 800 hours after dosing and analyzed for presence of PMAB65. Colons were collected at days 0, 5, 7, 15, 21, and 28, snap frozen, and analyzed for the presence of PMAB65. PMAB65 was detected in serum and colons of mice treated with PMAB65 at all time points. PMAB65 is detectable in gut tissue through 4 weeks following administration in mice.

### Example 44. PMAB65 Increases Expression of Treg Activation Markers

[0780] Eight-week-old human PD-1 knock-in mice were dosed subcutaneously in the dorsal scruff with vehicle, PMAB1F, PMAB1G, or PMAB65. After 7 days mice were euthanized, spleens dissected and splenocytes stained with antibodies against surface and intracellular markers to immunophenotype T cell subsets and measure expression of the activation markers LAG3 and CTLA4. Data showed increase in the frequency and number of splenic Treg co-expressing LAG3 and CTLA4. PMAB1F, PMAB1G, and PMAB65 increase the frequency and cell number of splenic Treg co-expressing LAG3 and CTLA4.

### Example 45. Optimized PD-1 Molecules Increase Expression of Treg Activation Markers

[0781] Eight-week-old human PD-1 knock-in mice were dosed subcutaneously in the dorsal scruff with vehicle, PMAB1F, PMAB65, PMAB68, or PMAB68. After 7 days mice were euthanized, spleens dissected and splenocytes stained with antibodies against surface and intracellular markers to immunophenotype T cell subsets and measure expression of the activation markers LAG3 and CTLA4. Data showed increase in the frequency and number of splenic Treg co-expressing LAG3 and CTLA4. Optimized PD-1 molecules increase the frequency and cell number of splenic Treg co-expressing LAG3 and CTLA4.

[0782] The disclosures of each and every patent, patent application, and publication cited herein are hereby incorporated herein by reference in their entirety. While various embodiments have been disclosed with reference to specific aspects, it is apparent that other aspects and variations of these embodiments may be devised by others skilled in the art without departing from the true spirit and scope of the embodiments. The appended claims are intended to be construed to include all such aspects and equivalent variations.

1. An antibody, or antigen binding fragment thereof, comprising a heavy chain variable region and a light chain variable region, wherein:
the heavy chain variable region comprises a heavy chain variable region CDR1 (HCDR1) having the amino acid sequence of SEQ ID NO: 1709, or 1719; a heavy chain variable region CDR2 (HCDR2) having the amino acid sequence of SEQ ID NO: 1712, or 1744; and heavy chain variable region CDR3 (HCDR3) having the amino acid sequence of SEQ ID NO: 1715, or 1724; and
the light chain variable region comprises a light chain variable region CDR1 (LCDR1) having the amino acid sequence of SEQ ID NO: 1716, or 1726; a light chain variable region CDR2 (LCDR2) having the amino acid sequence of SEQ ID NO: 1717, or 1728; and a light chain variable region CDR3 (LCDR3) having the amino acid sequence of SEQ ID NO: 1718, or 1729.

2. The antibody, or antigen binding fragment thereof, of claim 1, wherein:
the heavy chain variable region comprises a HCDR1 comprising the amino acid sequence of SEQ ID NO: 1719, a HCDR2 comprising the amino acid sequence of SEQ ID NO: 1744, and a HCDR3 comprising the amino acid sequence of SEQ ID NO: 1724;
the heavy chain variable region comprises a HCDR1 comprising the amino acid sequence of SEQ ID NO: 1709, a HCDR2 comprising the amino acid sequence of SEQ ID NO: 1712, and a HCDR3 comprising the amino acid sequence of SEQ ID NO: 1715;
the light chain variable region comprises a LCDR1 comprising the amino acid sequence of SEQ ID NO: 1726, a LCDR2 comprising the amino acid sequence of SEQ ID NO: 1728, and a LCDR3 comprising the amino acid sequence of SEQ ID NO: 1729; or
the light chain variable region comprises a LCDR1 comprising the amino acid sequence of SEQ ID NO: 1726, a LCDR2 comprising the amino acid sequence of SEQ ID NO: 1728, and a LCDR3 comprising the amino acid sequence of SEQ ID NO: 1729.

3-6. (canceled)

7. The antibody, or antigen binding fragment thereof, of claim 1, wherein the heavy chain variable region comprises an amino acid sequence of SEQ ID NOs: 1476, or 1478, and the light chain variable region comprises an amino acid of SEQ ID NO: 1359, or 1479.

8-11. (canceled)

12. An antibody, or antigen binding fragment thereof, comprising a heavy chain variable region and a light chain variable region, wherein:
the heavy chain variable region comprises a heavy chain variable region CDR1 (HCDR1) having an amino acid sequence of SEQ ID NO: 1719; a heavy chain variable region CDR2 (HCDR2) having an amino acid sequence of SEQ ID NO: 1744; and heavy chain variable region CDR3 (HCDR3) having an amino acid sequence of SEQ ID NO: 1724; and
the light chain variable region comprises a light chain variable region CDR1 (LCDR1) having an amino acid sequence of SEQ ID NO: 1726; a light chain variable region CDR2 (LCDR2) having an amino acid sequence of SEQ ID NO: 1728; and a light chain variable region CDR3 (LCDR3) having an amino acid sequence of SEQ ID NO: 1729.

13. The antibody, or antigen binding fragment thereof, of claim 1, wherein the heavy chain variable region and the light chain variable region are in a Fab format.

14. The antibody, or antigen binding fragment thereof, of claim 1, wherein the heavy chain variable region and the light variable chain region are linked with a peptide linker, optionally wherein the peptide linker is a glycine/serine linker.

15. (canceled)

16. The antibody, or antigen binding fragment thereof of claim 14, wherein the peptide linker comprises a sequence of GGGGSGGGGSGGGGSGGGGS (SEQ ID NO: 22), GGGGSGGGGSGGGGS (SEQ ID NO: 30), GGGGSGGGGS (SEQ ID NO: 619), GGGGS (SEQ ID NO: 23), or GGGSEGGGSEGGGSE (SEQ ID NO: 1546), or any combination thereof.

17. An antibody, or antigen binding fragment thereof, wherein the antibody comprises:
a light chain variable region comprising an amino acid sequence having at least 90% identity to an amino acid sequence selected from SEQ ID NOs: 1359, 1680, 1681, 1682, 1683, 1684, 1479, 1449, 1687, 1688, 1689, 1690, 1691, 1692, 1693, 1694, 1695, 1696, 1697, 1698, 1699, 1700, 1701, 1702, 1703, 1704, 1705, or 1706; and
a heavy chain variable region comprising an amino acid sequence having at least 90% identity to an amino acid sequence selected from SEQ ID NOs: 1476, 1679, 1685, 1584, 1478, 1707, or 1708.

18. The antibody of claim 17, or antigen binding fragment thereof, wherein the antibody comprises:
i. a variable light chain sequence of SEQ ID NO: 1359, or a variant thereof, and a variable heavy chain sequence of SEQ ID NO: 1476, or a variant thereof,
ii. a variable light chain sequence of SEQ ID NO: 1359, or a variant thereof, and a variable heavy chain sequence of SEQ ID NO: 1679, or a variant thereof,
iii. a variable light chain sequence of SEQ ID NO: 1359, or a variant thereof, and a variable heavy chain sequence of SEQ ID NO: 1685, or a variant thereof;
iv. a variable light chain sequence of SEQ ID NO: 1359, or a variant thereof, and a variable heavy chain sequence of SEQ ID NO: 1584, or a variant thereof;
v. a variable light chain sequence of SEQ ID NO: 1359, or a variant thereof, and a variable heavy chain sequence of SEQ ID NO: 1478, or a variant thereof;
vi. a variable light chain sequence of SEQ ID NO: 1359, or a variant thereof, and a variable heavy chain sequence of SEQ ID NO: 1707, or a variant thereof;
vii. a variable light chain sequence of SEQ ID NO: 1680, or a variant thereof, and a variable heavy chain sequence of SEQ ID NO: 1476, or a variant thereof;
viii. a variable light chain sequence of SEQ ID NO: 1680, or a variant thereof, and a variable heavy chain sequence of SEQ ID NO: 1679, or a variant thereof;
ix. a variable light chain sequence of SEQ ID NO: 1680, or a variant thereof, and a variable heavy chain sequence of SEQ ID NO: 1685, or a variant thereof;
x. a variable light chain sequence of SEQ ID NO: 1680, or a variant thereof, and a variable heavy chain sequence of SEQ ID NO: 1584, or a variant thereof;
xi. a variable light chain sequence of SEQ ID NO: 1680, or a variant thereof, and a variable heavy chain sequence of SEQ ID NO: 1478, or a variant thereof;
xii. a variable light chain sequence of SEQ ID NO: 1680, or a variant thereof, and a variable heavy chain sequence of SEQ ID NO: 1707, or a variant thereof;
xiii. a variable light chain sequence of SEQ ID NO: 1681, or a variant thereof, and a variable heavy chain sequence of SEQ ID NO: 1476, or a variant thereof;
xiv. a variable light chain sequence of SEQ ID NO: 1681, or a variant thereof, and a variable heavy chain sequence of SEQ ID NO: 1679, or a variant thereof;
xv. a variable light chain sequence of SEQ ID NO: 1681, or a variant thereof, and a variable heavy chain sequence of SEQ ID NO: 1685, or a variant thereof;
xvi. a variable light chain sequence of SEQ ID NO: 1681, or a variant thereof, and a variable heavy chain sequence of SEQ ID NO: 1584, or a variant thereof;
xvii. a variable light chain sequence of SEQ ID NO: 1681, or a variant thereof, and a variable heavy chain sequence of SEQ ID NO: 1478, or a variant thereof;
xviii. a variable light chain sequence of SEQ ID NO: 1681, or a variant thereof, and a variable heavy chain sequence of SEQ ID NO: 1707, or a variant thereof;
xix. a variable light chain sequence of SEQ ID NO: 1682, or a variant thereof, and a variable heavy chain sequence of SEQ ID NO: 1476, or a variant thereof;
xx. a variable light chain sequence of SEQ ID NO: 1682, or a variant thereof, and a variable heavy chain sequence of SEQ ID NO: 1679, or a variant thereof;
xxi. a variable light chain sequence of SEQ ID NO: 1682, or a variant thereof, and a variable heavy chain sequence of SEQ ID NO: 1685, or a variant thereof;
xxii. a variable light chain sequence of SEQ ID NO: 1682, or a variant thereof, and a variable heavy chain sequence of SEQ ID NO: 1584, or a variant thereof;
xxiii. a variable light chain sequence of SEQ ID NO: 1682, or a variant thereof, and a variable heavy chain sequence of SEQ ID NO: 1478, or a variant thereof;
xxiv. a variable light chain sequence of SEQ ID NO: 1682, or a variant thereof, and a variable heavy chain sequence of SEQ ID NO: 1707, or a variant thereof;
xxv. a variable light chain sequence of SEQ ID NO: 1683, or a variant thereof, and a variable heavy chain sequence of SEQ ID NO: 1476, or a variant thereof;
xxvi. a variable light chain sequence of SEQ ID NO: 1683, or a variant thereof, and a variable heavy chain sequence of SEQ ID NO: 1679, or a variant thereof;
xxvii. a variable light chain sequence of SEQ ID NO: 1683, or a variant thereof, and a variable heavy chain sequence of SEQ ID NO: 1685, or a variant thereof;
xxviii. a variable light chain sequence of SEQ ID NO: 1683, or a variant thereof, and a variable heavy chain sequence of SEQ ID NO: 1584, or a variant thereof;
xxix. a variable light chain sequence of SEQ ID NO: 1683, or a variant thereof, and a variable heavy chain sequence of SEQ ID NO: 1478, or a variant thereof;
xxx. a variable light chain sequence of SEQ ID NO: 1683, or a variant thereof, and a variable heavy chain sequence of SEQ ID NO: 1707, or a variant thereof;
xxxi. a variable light chain sequence of SEQ ID NO: 1684, or a variant thereof, and a variable heavy chain sequence of SEQ ID NO: 1476, or a variant thereof;
xxxii. a variable light chain sequence of SEQ ID NO: 1684, or a variant thereof, and a variable heavy chain sequence of SEQ ID NO: 1679, or a variant thereof;
xxxiii. a variable light chain sequence of SEQ ID NO: 1684, or a variant thereof, and a variable heavy chain sequence of SEQ ID NO: 1685, or a variant thereof;
xxxiv. a variable light chain sequence of SEQ ID NO: 1684, or a variant thereof, and a variable heavy chain sequence of SEQ ID NO: 1584, or a variant thereof;
xxxv. a variable light chain sequence of SEQ ID NO: 1684, or a variant thereof, and a variable heavy chain sequence of SEQ ID NO: 1478, or a variant thereof;
xxxvi. a variable light chain sequence of SEQ ID NO: 1684, or a variant thereof, and a variable heavy chain sequence of SEQ ID NO: 1707, or a variant thereof;
xxxvii. a variable light chain sequence of SEQ ID NO: 1479, or a variant thereof, and a variable heavy chain sequence of SEQ ID NO: 1476, or a variant thereof;
xxxviii. a variable light chain sequence of SEQ ID NO: 1479, or a variant thereof, and a variable heavy chain sequence of SEQ ID NO: 1679, or a variant thereof;
xxxix. a variable light chain sequence of SEQ ID NO: 1479, or a variant thereof, and a variable heavy chain sequence of SEQ ID NO: 1685, or a variant thereof;
xl. a variable light chain sequence of SEQ ID NO: 1479, or a variant thereof, and a variable heavy chain sequence of SEQ ID NO: 1584, or a variant thereof;
xli. a variable light chain sequence of SEQ ID NO: 1479, or a variant thereof, and a variable heavy chain sequence of SEQ ID NO: 1478, or a variant thereof;
xlii. a variable light chain sequence of SEQ ID NO: 1479, or a variant thereof, and a variable heavy chain sequence of SEQ ID NO: 1707, or a variant thereof;
xliii. a variable light chain sequence of SEQ ID NO: 1449, or a variant thereof, and a variable heavy chain sequence of SEQ ID NO: 1476, or a variant thereof;
xliv. a variable light chain sequence of SEQ ID NO: 1449, or a variant thereof, and a variable heavy chain sequence of SEQ ID NO: 1679, or a variant thereof;
xlv. a variable light chain sequence of SEQ ID NO: 1449, or a variant thereof, and a variable heavy chain sequence of SEQ ID NO: 1685, or a variant thereof;
xlvi. a variable light chain sequence of SEQ ID NO: 1449, or a variant thereof, and a variable heavy chain sequence of SEQ ID NO: 1584, or a variant thereof;
xlvii. a variable light chain sequence of SEQ ID NO: 1449, or a variant thereof, and a variable heavy chain sequence of SEQ ID NO: 1478, or a variant thereof;
xlviii. a variable light chain sequence of SEQ ID NO: 1449, or a variant thereof, and a variable heavy chain sequence of SEQ ID NO: 1707, or a variant thereof;
xlix. a variable light chain sequence of SEQ ID NO: 1687, or a variant thereof, and a variable heavy chain sequence of SEQ ID NO: 1476, or a variant thereof;
l. a variable light chain sequence of SEQ ID NO: 1687, or a variant thereof, and a variable heavy chain sequence of SEQ ID NO: 1679, or a variant thereof;
li. a variable light chain sequence of SEQ ID NO: 1687, or a variant thereof, and a variable heavy chain sequence of SEQ ID NO: 1685, or a variant thereof;
lii. a variable light chain sequence of SEQ ID NO: 1687, or a variant thereof, and a variable heavy chain sequence of SEQ ID NO: 1584, or a variant thereof;
liii. a variable light chain sequence of SEQ ID NO: 1687, or a variant thereof, and a variable heavy chain sequence of SEQ ID NO: 1478, or a variant thereof;
liv. a variable light chain sequence of SEQ ID NO: 1687, or a variant thereof, and a variable heavy chain sequence of SEQ ID NO: 1707, or a variant thereof;
lv. a variable light chain sequence of SEQ ID NO: 1688, or a variant thereof, and a variable heavy chain sequence of SEQ ID NO: 1476, or a variant thereof;
lvi. a variable light chain sequence of SEQ ID NO: 1688, or a variant thereof, and a variable heavy chain sequence of SEQ ID NO: 1679, or a variant thereof;
lvii. a variable light chain sequence of SEQ ID NO: 1688, or a variant thereof, and a variable heavy chain sequence of SEQ ID NO: 1685, or a variant thereof;
lviii. a variable light chain sequence of SEQ ID NO: 1688, or a variant thereof, and a variable heavy chain sequence of SEQ ID NO: 1584, or a variant thereof;
lix. a variable light chain sequence of SEQ ID NO: 1688, or a variant thereof, and a variable heavy chain sequence of SEQ ID NO: 1478, or a variant thereof;
lx. a variable light chain sequence of SEQ ID NO: 1688, or a variant thereof, and a variable heavy chain sequence of SEQ ID NO: 1707, or a variant thereof;
lxi. a variable light chain sequence of SEQ ID NO: 1689, or a variant thereof, and a variable heavy chain sequence of SEQ ID NO: 1476, or a variant thereof;
lxii. a variable light chain sequence of SEQ ID NO: 1689, or a variant thereof, and a variable heavy chain sequence of SEQ ID NO: 1679, or a variant thereof;
lxiii. a variable light chain sequence of SEQ ID NO: 1689, or a variant thereof, and a variable heavy chain sequence of SEQ ID NO: 1685, or a variant thereof;
lxiv. a variable light chain sequence of SEQ ID NO: 1689, or a variant thereof, and a variable heavy chain sequence of SEQ ID NO: 1584, or a variant thereof;
lxv. a variable light chain sequence of SEQ ID NO: 1689, or a variant thereof, and a variable heavy chain sequence of SEQ ID NO: 1478, or a variant thereof;
lxvi. a variable light chain sequence of SEQ ID NO: 1689, or a variant thereof, and a variable heavy chain sequence of SEQ ID NO: 1707, or a variant thereof;
lxvii. a variable light chain sequence of SEQ ID NO: 1690, or a variant thereof, and a variable heavy chain sequence of SEQ ID NO: 1476, or a variant thereof;
lxviii. a variable light chain sequence of SEQ ID NO: 1690, or a variant thereof, and a variable heavy chain sequence of SEQ ID NO: 1679, or a variant thereof;
lxix. a variable light chain sequence of SEQ ID NO: 1690, or a variant thereof, and a variable heavy chain sequence of SEQ ID NO: 1685, or a variant thereof;
lxx. a variable light chain sequence of SEQ ID NO: 1690, or a variant thereof, and a variable heavy chain sequence of SEQ ID NO: 1584, or a variant thereof;
lxxi. a variable light chain sequence of SEQ ID NO: 1690, or a variant thereof, and a variable heavy chain sequence of SEQ ID NO: 1478, or a variant thereof;
lxxii. a variable light chain sequence of SEQ ID NO: 1690, or a variant thereof, and a variable heavy chain sequence of SEQ ID NO: 1707, or a variant thereof;
lxxiii. a variable light chain sequence of SEQ ID NO: 1691, or a variant thereof, and a variable heavy chain sequence of SEQ ID NO: 1476, or a variant thereof;
lxxiv. a variable light chain sequence of SEQ ID NO: 1691, or a variant thereof, and a variable heavy chain sequence of SEQ ID NO: 1679, or a variant thereof;
lxxv. a variable light chain sequence of SEQ ID NO: 1691, or a variant thereof, and a variable heavy chain sequence of SEQ ID NO: 1685, or a variant thereof;
lxxvi. a variable light chain sequence of SEQ ID NO: 1691, or a variant thereof, and a variable heavy chain sequence of SEQ ID NO: 1584, or a variant thereof;
lxxvii. a variable light chain sequence of SEQ ID NO: 1691, or a variant thereof, and a variable heavy chain sequence of SEQ ID NO: 1478, or a variant thereof;
lxxviii. a variable light chain sequence of SEQ ID NO: 1691, or a variant thereof, and a variable heavy chain sequence of SEQ ID NO: 1707, or a variant thereof;
lxxix. a variable light chain sequence of SEQ ID NO: 1692, or a variant thereof, and a variable heavy chain sequence of SEQ ID NO: 1476, or a variant thereof;
lxxx. a variable light chain sequence of SEQ ID NO: 1692, or a variant thereof, and a variable heavy chain sequence of SEQ ID NO: 1679, or a variant thereof;
lxxxi. a variable light chain sequence of SEQ ID NO: 1692, or a variant thereof, and a variable heavy chain sequence of SEQ ID NO: 1685, or a variant thereof;
lxxxii. a variable light chain sequence of SEQ ID NO: 1692, or a variant thereof, and a variable heavy chain sequence of SEQ ID NO: 1584, or a variant thereof;
lxxxiii. a variable light chain sequence of SEQ ID NO: 1692, or a variant thereof, and a variable heavy chain sequence of SEQ ID NO: 1478, or a variant thereof;
lxxxiv. a variable light chain sequence of SEQ ID NO: 1692, or a variant thereof, and a variable heavy chain sequence of SEQ ID NO: 1707, or a variant thereof;
lxxxv. a variable light chain sequence of SEQ ID NO: 1693, or a variant thereof, and a variable heavy chain sequence of SEQ ID NO: 1476, or a variant thereof;
lxxxvi. a variable light chain sequence of SEQ ID NO: 1693, or a variant thereof, and a variable heavy chain sequence of SEQ ID NO: 1679, or a variant thereof;
lxxxvii. a variable light chain sequence of SEQ ID NO: 1693, or a variant thereof, and a variable heavy chain sequence of SEQ ID NO: 1685, or a variant thereof;
lxxxviii. a variable light chain sequence of SEQ ID NO: 1693, or a variant thereof, and a variable heavy chain sequence of SEQ ID NO: 1584, or a variant thereof;
lxxxix. a variable light chain sequence of SEQ ID NO: 1693, or a variant thereof, and a variable heavy chain sequence of SEQ ID NO: 1478, or a variant thereof;
xc. a variable light chain sequence of SEQ ID NO: 1693, or a variant thereof, and a variable heavy chain sequence of SEQ ID NO: 1707, or a variant thereof;
xci. a variable light chain sequence of SEQ ID NO: 1694, or a variant thereof, and a variable heavy chain sequence of SEQ ID NO: 1476, or a variant thereof;
xcii. a variable light chain sequence of SEQ ID NO: 1694, or a variant thereof, and a variable heavy chain sequence of SEQ ID NO: 1679, or a variant thereof;
xciii. a variable light chain sequence of SEQ ID NO: 1694, or a variant thereof, and a variable heavy chain sequence of SEQ ID NO: 1685, or a variant thereof;
xciv. a variable light chain sequence of SEQ ID NO: 1694, or a variant thereof, and a variable heavy chain sequence of SEQ ID NO: 1584, or a variant thereof;
xcv. a variable light chain sequence of SEQ ID NO: 1694, or a variant thereof, and a variable heavy chain sequence of SEQ ID NO: 1478, or a variant thereof;
xcvi. a variable light chain sequence of SEQ ID NO: 1694, or a variant thereof, and a variable heavy chain sequence of SEQ ID NO: 1707, or a variant thereof;
xcvii. a variable light chain sequence of SEQ ID NO: 1695, or a variant thereof, and a variable heavy chain sequence of SEQ ID NO: 1476, or a variant thereof;
xcviii. a variable light chain sequence of SEQ ID NO: 1695, or a variant thereof, and a variable heavy chain sequence of SEQ ID NO: 1679, or a variant thereof;
xcix. a variable light chain sequence of SEQ ID NO: 1695, or a variant thereof, and a variable heavy chain sequence of SEQ ID NO: 1685, or a variant thereof;
c. a variable light chain sequence of SEQ ID NO: 1695, or a variant thereof, and a variable heavy chain sequence of SEQ ID NO: 1584, or a variant thereof;
ci. a variable light chain sequence of SEQ ID NO: 1695, or a variant thereof, and a variable heavy chain sequence of SEQ ID NO: 1478, or a variant thereof;
cii. a variable light chain sequence of SEQ ID NO: 1695, or a variant thereof, and a variable heavy chain sequence of SEQ ID NO: 1707, or a variant thereof;
ciii. a variable light chain sequence of SEQ ID NO: 1696, or a variant thereof, and a variable heavy chain sequence of SEQ ID NO: 1476, or a variant thereof;
civ. a variable light chain sequence of SEQ ID NO: 1696, or a variant thereof, and a variable heavy chain sequence of SEQ ID NO: 1679, or a variant thereof;
cv. a variable light chain sequence of SEQ ID NO: 1696, or a variant thereof, and a variable heavy chain sequence of SEQ ID NO: 1685, or a variant thereof;
cvi. a variable light chain sequence of SEQ ID NO: 1696, or a variant thereof, and a variable heavy chain sequence of SEQ ID NO: 1584, or a variant thereof;
cvii. a variable light chain sequence of SEQ ID NO: 1696, or a variant thereof, and a variable heavy chain sequence of SEQ ID NO: 1478, or a variant thereof;
cviii. a variable light chain sequence of SEQ ID NO: 1696, or a variant thereof, and a variable heavy chain sequence of SEQ ID NO: 1707, or a variant thereof;
cix. a variable light chain sequence of SEQ ID NO: 1697, or a variant thereof, and a variable heavy chain sequence of SEQ ID NO: 1476, or a variant thereof;
cx. a variable light chain sequence of SEQ ID NO: 1697, or a variant thereof, and a variable heavy chain sequence of SEQ ID NO: 1679, or a variant thereof;
cxi. a variable light chain sequence of SEQ ID NO: 1697, or a variant thereof, and a variable heavy chain sequence of SEQ ID NO: 1685, or a variant thereof;
cxii. a variable light chain sequence of SEQ ID NO: 1697, or a variant thereof, and a variable heavy chain sequence of SEQ ID NO: 1584, or a variant thereof;
cxiii. a variable light chain sequence of SEQ ID NO: 1697, or a variant thereof, and a variable heavy chain sequence of SEQ ID NO: 1478, or a variant thereof;
cxiv. a variable light chain sequence of SEQ ID NO: 1697, or a variant thereof, and a variable heavy chain sequence of SEQ ID NO: 1707, or a variant thereof;
cxv. a variable light chain sequence of SEQ ID NO: 1698, or a variant thereof, and a variable heavy chain sequence of SEQ ID NO: 1476, or a variant thereof;
cxvi. a variable light chain sequence of SEQ ID NO: 1698, or a variant thereof, and a variable heavy chain sequence of SEQ ID NO: 1679, or a variant thereof;
cxvii. a variable light chain sequence of SEQ ID NO: 1698, or a variant thereof, and a variable heavy chain sequence of SEQ ID NO: 1685, or a variant thereof;
cxviii. a variable light chain sequence of SEQ ID NO: 1698, or a variant thereof, and a variable heavy chain sequence of SEQ ID NO: 1584, or a variant thereof;
cxix. a variable light chain sequence of SEQ ID NO: 1698, or a variant thereof, and a variable heavy chain sequence of SEQ ID NO: 1478, or a variant thereof;
cxx. a variable light chain sequence of SEQ ID NO: 1698, or a variant thereof, and a variable heavy chain sequence of SEQ ID NO: 1707, or a variant thereof;
cxxi. a variable light chain sequence of SEQ ID NO: 1699, or a variant thereof, and a variable heavy chain sequence of SEQ ID NO: 1476, or a variant thereof;
cxxii. a variable light chain sequence of SEQ ID NO: 1699, or a variant thereof, and a variable heavy chain sequence of SEQ ID NO: 1679, or a variant thereof;
cxxiii. a variable light chain sequence of SEQ ID NO: 1699, or a variant thereof, and a variable heavy chain sequence of SEQ ID NO: 1685, or a variant thereof;
cxxiv. a variable light chain sequence of SEQ ID NO: 1699, or a variant thereof, and a variable heavy chain sequence of SEQ ID NO: 1584, or a variant thereof;
cxxv. a variable light chain sequence of SEQ ID NO: 1699, or a variant thereof, and a variable heavy chain sequence of SEQ ID NO: 1478, or a variant thereof;
cxxvi. a variable light chain sequence of SEQ ID NO: 1699, or a variant thereof, and a variable heavy chain sequence of SEQ ID NO: 1707, or a variant thereof;
cxxvii. a variable light chain sequence of SEQ ID NO: 1700, or a variant thereof, and a variable heavy chain sequence of SEQ ID NO: 1476, or a variant thereof;
cxxviii. a variable light chain sequence of SEQ ID NO: 1700, or a variant thereof, and a variable heavy chain sequence of SEQ ID NO: 1679, or a variant thereof;
cxxix. a variable light chain sequence of SEQ ID NO: 1700, or a variant thereof, and a variable heavy chain sequence of SEQ ID NO: 1685, or a variant thereof;
cxxx. a variable light chain sequence of SEQ ID NO: 1700, or a variant thereof, and a variable heavy chain sequence of SEQ ID NO: 1584, or a variant thereof;
cxxxi. a variable light chain sequence of SEQ ID NO: 1700, or a variant thereof, and a variable heavy chain sequence of SEQ ID NO: 1478, or a variant thereof;
cxxxii. a variable light chain sequence of SEQ ID NO: 1700, or a variant thereof, and a variable heavy chain sequence of SEQ ID NO: 1707, or a variant thereof;
cxxxiii. a variable light chain sequence of SEQ ID NO: 1701, or a variant thereof, and a variable heavy chain sequence of SEQ ID NO: 1476, or a variant thereof;
cxxxiv. a variable light chain sequence of SEQ ID NO: 1701, or a variant thereof, and a variable heavy chain sequence of SEQ ID NO: 1679, or a variant thereof;
cxxxv. a variable light chain sequence of SEQ ID NO: 1701, or a variant thereof, and a variable heavy chain sequence of SEQ ID NO: 1685, or a variant thereof;
cxxxvi. a variable light chain sequence of SEQ ID NO: 1701, or a variant thereof, and a variable heavy chain sequence of SEQ ID NO: 1584, or a variant thereof;
cxxxvii. a variable light chain sequence of SEQ ID NO: 1701, or a variant thereof, and a variable heavy chain sequence of SEQ ID NO: 1478, or a variant thereof;
cxxxviii. a variable light chain sequence of SEQ ID NO: 1701, or a variant thereof, and a variable heavy chain sequence of SEQ ID NO: 1707, or a variant thereof;
cxxxix. a variable light chain sequence of SEQ ID NO: 1702, or a variant thereof, and a variable heavy chain sequence of SEQ ID NO: 1476, or a variant thereof;
cxl. a variable light chain sequence of SEQ ID NO: 1702, or a variant thereof, and a variable heavy chain sequence of SEQ ID NO: 1679, or a variant thereof;
cxli. a variable light chain sequence of SEQ ID NO: 1702, or a variant thereof, and a variable heavy chain sequence of SEQ ID NO: 1685, or a variant thereof;
cxlii. a variable light chain sequence of SEQ ID NO: 1702, or a variant thereof, and a variable heavy chain sequence of SEQ ID NO: 1584, or a variant thereof;
cxliii. a variable light chain sequence of SEQ ID NO: 1702, or a variant thereof, and a variable heavy chain sequence of SEQ ID NO: 1478, or a variant thereof;
cxliv. a variable light chain sequence of SEQ ID NO: 1702, or a variant thereof, and a variable heavy chain sequence of SEQ ID NO: 1707, or a variant thereof;
cxlv. a variable light chain sequence of SEQ ID NO: 1703, or a variant thereof, and a variable heavy chain sequence of SEQ ID NO: 1476, or a variant thereof;
cxlvi. a variable light chain sequence of SEQ ID NO: 1703, or a variant thereof, and a variable heavy chain sequence of SEQ ID NO: 1679, or a variant thereof;
cxlvii. a variable light chain sequence of SEQ ID NO: 1703, or a variant thereof, and a variable heavy chain sequence of SEQ ID NO: 1685, or a variant thereof;
cxlviii. a variable light chain sequence of SEQ ID NO: 1703, or a variant thereof, and a variable heavy chain sequence of SEQ ID NO: 1584, or a variant thereof;
cxlix. a variable light chain sequence of SEQ ID NO: 1703, or a variant thereof, and a variable heavy chain sequence of SEQ ID NO: 1478, or a variant thereof;
cl. a variable light chain sequence of SEQ ID NO: 1703, or a variant thereof, and a variable heavy chain sequence of SEQ ID NO: 1707, or a variant thereof;
cli. a variable light chain sequence of SEQ ID NO: 1704, or a variant thereof, and a variable heavy chain sequence of SEQ ID NO: 1476, or a variant thereof;
clii. a variable light chain sequence of SEQ ID NO: 1704, or a variant thereof, and a variable heavy chain sequence of SEQ ID NO: 1679, or a variant thereof;
cliii. a variable light chain sequence of SEQ ID NO: 1704, or a variant thereof, and a variable heavy chain sequence of SEQ ID NO: 1685, or a variant thereof;
cliv. a variable light chain sequence of SEQ ID NO: 1704, or a variant thereof, and a variable heavy chain sequence of SEQ ID NO: 1584, or a variant thereof;
clv. a variable light chain sequence of SEQ ID NO: 1704, or a variant thereof, and a variable heavy chain sequence of SEQ ID NO: 1478, or a variant thereof;
clvi. a variable light chain sequence of SEQ ID NO: 1704, or a variant thereof, and a variable heavy chain sequence of SEQ ID NO: 1707, or a variant thereof;
clvii. a variable light chain sequence of SEQ ID NO: 1705, or a variant thereof, and a variable heavy chain sequence of SEQ ID NO: 1476, or a variant thereof;
clviii. a variable light chain sequence of SEQ ID NO: 1705, or a variant thereof, and a variable heavy chain sequence of SEQ ID NO: 1679, or a variant thereof;
clix. a variable light chain sequence of SEQ ID NO: 1705, or a variant thereof, and a variable heavy chain sequence of SEQ ID NO: 1685, or a variant thereof;
clx. a variable light chain sequence of SEQ ID NO: 1705, or a variant thereof, and a variable heavy chain sequence of SEQ ID NO: 1584, or a variant thereof;
clxi. a variable light chain sequence of SEQ ID NO: 1705, or a variant thereof, and a variable heavy chain sequence of SEQ ID NO: 1478, or a variant thereof;
clxii. a variable light chain sequence of SEQ ID NO: 1705, or a variant thereof, and a variable heavy chain sequence of SEQ ID NO: 1707, or a variant thereof;
clxiii. a variable light chain sequence of SEQ ID NO: 1706, or a variant thereof, and a variable heavy chain sequence of SEQ ID NO: 1476, or a variant thereof;
clxiv. a variable light chain sequence of SEQ ID NO: 1706, or a variant thereof, and a variable heavy chain sequence of SEQ ID NO: 1679, or a variant thereof;
clxv. a variable light chain sequence of SEQ ID NO: 1706, or a variant thereof, and a variable heavy chain sequence of SEQ ID NO: 1685, or a variant thereof;
clxvi. a variable light chain sequence of SEQ ID NO: 1706, or a variant thereof, and a variable heavy chain sequence of SEQ ID NO: 1584, or a variant thereof;
clxvii. a variable light chain sequence of SEQ ID NO: 1706, or a variant thereof, and a variable heavy chain sequence of SEQ ID NO: 1478, or a variant thereof;
clxviii. a variable light chain sequence of SEQ ID NO: 1706, or a variant thereof, and a variable heavy chain sequence of SEQ ID NO: 1707, or a variant thereof.

19. The antibody, or antigen binding fragment thereof, of claim 1, wherein the antibody, or antigen binding fragment thereof binds to PD-1, optionally wherein the antibody, or antigen binding fragment thereof that binds to PD-1 is a PD-1 agonist.

20. (canceled)

21. The antibody, or antigen binding fragment thereof of claim 1, wherein the antibody is linked or associated with another antibody or targeting moiety, optionally wherein the another antibody or targeting moiety binds to MAdCAM.

22. (canceled)

23. The antibody, or antigen binding fragment thereof of claim 21, wherein the antibody that binds to MAdCAM comprises:
the heavy chain variable region comprises a heavy chain variable region CDR1 (HCDR1) having the amino acid sequence of SEQ ID NO: 1731, 1721, or 1499; a heavy chain variable region CDR2 (HCDR2) having the amino acid sequence of SEQ ID NO: 1732, 1733, 1506; and a heavy chain variable region CDR3 (HCDR3) having the amino acid sequence of SEQ ID NO: 1734, 1735, 1739, 1740, 1507, 1531, or 1532; and
the light chain variable region comprises a light chain variable region CDR1 (LCDR1) having the amino acid sequence of SEQ ID NO: 1502, 1736, or 1737; a light chain variable region CDR2 (LCDR2) having the amino acid sequence of SEQ ID NO: 1497, or 1717; and a light chain variable region CDR3 (LCDR3) having the amino acid sequence of SEQ ID NO: 1498, or 1738.

24. The antibody, or antigen binding fragment thereof, of claim 23, wherein:
(i) the heavy chain variable region comprises a HCDR1 comprising the amino acid sequence of SEQ ID NO: 1731, a HCDR2 comprising the amino acid sequence of SEQ ID NO: 1732, and a HCDR3 comprising the amino acid sequence of SEQ ID NO: 1734; and
the light chain variable region comprises a LCDR1 comprising the amino acid sequence of SEQ ID NO: 1736, a LCDR2 comprising the amino acid sequence of SEQ ID NO: 1717, and a LCDR3 comprising the amino acid sequence of SEQ ID NO: 1738 or
(ii) the heavy chain variable region comprises a HCDR1 comprising the amino acid sequence of SEQ ID NO: 1499, a HCDR2 comprising the amino acid sequence of SEQ ID NO: 1506, and a HCDR3 comprising the amino acid sequence of SEQ ID NO: 1507, and
the light chain variable region comprises a LCDR1 comprising the amino acid sequence of SEQ ID NO: 1502, a LCDR2 comprising the amino acid sequence of SEQ ID NO: 1497, and a LCDR3 comprising the amino acid sequence of SEQ ID NO: 1498.

25. (canceled)

26. The antibody, or antigen binding fragment thereof, of claim 21, wherein the heavy chain variable region comprises an amino acid sequence having at least 90% identity to the amino acid sequence of SEQ ID NO: 1445, 591, 1443, 1480, 1545, or 1542; and the light chain variable region comprises an amino acid sequence having at least 90% identity to the amino acid sequence of SEQ ID NO: 1367, 592, or 1543.

27. (canceled)

28. The antibody, or antigen binding fragment thereof of claim 26, wherein the heavy chain variable region comprises the amino acid sequence of SEQ ID NO: 1445 and/or the light chain variable region comprises the amino acid sequence of SEQ ID NO: 1367.

29-30. (canceled)

31. An antibody, or antigen binding fragment thereof, wherein the antibody comprises:
a light chain comprising an amino acid sequence having at least 90% identity to an amino acid sequence of SEQ ID NO: 1751; and
a heavy chain comprising an amino acid sequence having at least 90% identity to an amino acid sequence selected of SEQ ID NO: 1752.

32. (canceled)

33. A PD-1 agonist comprising four polypeptide chains, wherein the four polypeptide chains comprise:
Chain 1: N terminus (nt)-VH1-CH1-CH2-CH3-Linker A-scFv[VL2-Linker B-VH2]-C terminus (ct);
Chain 2: nt-VH1-CH1-CH2-CH3-Linker A-scFv[VL2-Linker B-VH2]-ct;
Chain 3: nt-VL1-CK-ct; and
Chain 4: nt-VL1-CK-ct;
wherein:
VH1 comprises the sequence of SEQ ID NO: 1476;
CH1-CH2-CH3 comprises the sequence of SEQ ID NO: 44;
Linker A comprises the sequence of SEQ ID NO: 30;
VL2 comprises the sequence of SEQ ID NO: 1445;
Linker B comprises the sequence of SEQ ID NO: 22;
VH2 comprises the sequence of SEQ ID NO: 1367;
VL1 comprises the sequence of SEQ ID NO: 1359; and
CK comprises the sequence of SEQ ID NO: 45.

34. The PD-1 agonist of claim 31, wherein the PD-1 agonist is a homodimer.

35. A pharmaceutical composition comprising the antibody, or antigen binding fragment thereof, of claim 1, and a pharmaceutically acceptable carrier.

36. A method of treating inflammatory bowel disease, the method comprising administering an antibody, or antigen binding fragment thereof of claim 1 to a subject in need thereof.

37. (canceled)

38. A method of treating auto-immune hepatitis, primary sclerosing cholangitis, Type 1 diabetes, graft-versus-host disease (GVHD), or an autoimmune disorder, the method comprising administering an antibody, or antigen binding fragment thereof of claim 1 to a subject in need thereof.

39. An isolated nucleic acid molecule encoding the antibody, or an antigen binding fragment thereof of claim 1.

40. An expression vector comprising the isolated nucleic acid of claim 39.

41. A host cell comprising the nucleic acid molecule of claim 39.

42. A method of producing an antibody, or antigen binding fragment thereof, of claim 1 comprising:
(a) culturing a host cell comprising one or more nucleic acids in a culture medium under conditions favorable for expression of the one or more nucleic acids; and
(b) optionally recovering the antibody or antigen binding fragment thereof from the culture medium.

The application's sequence listing, which the Patent Office published only in electronic form, follows.

SEQUENCE LISTING (1752 sequences)

SEQ ID NO: 1 - protein, 510 aa, Homo sapiens
MEDTKESNVKTFCSKNILAILGFSSIIAVIALLAVGLTQNKALPENVKYGIVLDAGSSHTSLYIYKWPAEKENDTGVVHQVEECRVKGPGISKFVQKVNEIGIYLTDCMERAREVIPRSQHQETPVYLGATAGMRLLRMESEELADRVLDVVERSLSNYPFDFQGARIITGQEEGAYGWITINYLLGKFSQKTRWFSIVPYETNNQETFGALDLGGASTQVTFVPQNQTIESPDNALQFRLYGKDYNVYTHSFLCYGKDQALWQKLAKDIQVASNEILRDPCFHPGYKKVVNVSDLYKTPCTKRFEMTLPFQQFEIQGIGNYQQCHQSILELFNTSYCPYSQCAFNGIFLPPLQGDFGAFSAFYFVMKFLNLTSEKVSQEKVTEMMKKFCAQPWEEIKTSYAGVKEKYLSEYCFSGTYILSLLLQGYHFTADSWEHIHFIGKIQGSDAGWTLGYMLNLTNMIPAEQPLSTPLSHSTYVFLMVLFSLVLFTVAIIGLLIFHKPSYFWKDMV

SEQ ID NO: 2 - protein, 574 aa, Homo sapiens [sequence omitted]

SEQ ID NO: 3 - protein, 290 aa, Artificial Sequence
  Description of Artificial Sequence: Synthetic polypeptide
MRIFAVFIFMTYWHLLNAFTVTVPKDLYVVEYGSNMTIECKFPVEKQLDLAALIVYWEMEDKNIIQFVHGEEDLKVQHSSYRQRARLLKDQLSLGNAALQITDVKLQDAGVYRCMISYGGADYKRITVKVNAPYNKINQRILVVDPVTSEHELTCQAEGYPKAEVIWTSSDHQVLSGKTTTTNSKREEKLFNVTSTLRINTTTNEIFYCTFRRLDPEENHTAELVIPELPLAHPPNERTHLVILGAILLCLGVALTFIFRLRKGRMMDVKKCGIQDTNSKKQSDTHLEET

SEQ ID NO: 4 - protein, 313 aa, Artificial Sequence
  Description of Artificial Sequence: Synthetic polypeptide
MVVMAPRTLFLLLSGALTLTETWAGSHSMRYFSAAVSRPGRGEPRFIAMGYVDDTQFVRFDSDSACPRMEPRAPWVEQEGPEYWEEETRNTKAHAQTDRMNLQTLRGYYNQSEASSHTLQWMIGCDLGSDGRLLRGYEQYAYDGKDYLALNEDLRSWTAADTAAQISKRKCEAANVAEQRRAYLEGTCVEWLHRYLENGKEMLQRADPPKTHVTHHPVFDYEATLRCWALGFYPAEIILTWQRDGEDQTQDVELVETRPAGDGTFQKWAAVVVPSGEEQRYTCHVQHEGLPEPLMLRWKQSSLPTIPIMGIVA

SEQ ID NO: 5 - skipped

SEQ ID NO: 6 - protein, 133 aa, Artificial Sequence [sequence omitted]

SEQ ID NO: 7 - protein, 369 aa, Artificial Sequence
  Description of Artificial Sequence: Synthetic polypeptide
APTSSSTKKTQLQLEHLLLDLQMILNGINNYKNPKLTRMLTFKFYMPKKATELKHLQCLEEELKPLEEVLNLAQSKNFHLRPRDLISRINVIVLELKGSETTFMCEYADETATIVEFLNRWITFSQSIISTLTGGGGAGGGGDKTHTCPPCPAPELLGGPSVFLFPPKPKDTLMISRTPEVTCVVVDVSHEDPEVKFNWYVDGVEVHNAKTKPREEQYASTYRVVSVLTVLHQDWLNGKEYKCKVSNKALPAPIEKTISKAKGQPREPQVYTLPPSRDELTKNQVSLTCLVKGFYPSDIAVEWESNGQPENNYKTTPPVLDSDGSFFLYSKLTVDKSRWQQGNVFSCSVMHEALHNHYTQKSLSLSPGK

SEQ ID NO: 8 - protein, 356 aa, Artificial Sequence
  Description of Artificial Sequence: Synthetic polypeptide
APTSSSTKKTQLQLEHLLLHLQMILNGINNYKNPKLTRMLTFKFYMPKKATELKHLQCLEEELKPLEEVLNLAQSKNFHLRPRDLISNINVIVLELKGSETTFMCEYADETATIVEFLNRWITFSQSIISTLTVECPPCPAPPVAGPSVFLFPPKPKDTLMISRTPEVTCVVVDVSHEDPEVQFNWYVDGVEVHNAKTKPREEQFNSTFRVVSVLTVVHQDWLNGKEYKCKVSNKGLPAPIEKTISKTKGQPREPQVYTLPPSREEMTKNQVSLTCLVKGFYPSDIAVEWESNGQPENNYKTTPPMLDSDGSFFLYSKLTVDKSRWQQGNVFSCSVMHEALHNHYTQKSLSLSPGK

SEQ ID NO: 9 - protein, 359 aa, Artificial Sequence
  Description of Artificial Sequence: Synthetic polypeptide
APTSSSTKKTQLQLEHLLLDLQMILNGINNYKNPKLTRMLTFKFYMPKKATELKHLQCLEEELKPLEEVLNLAQSKNFHLRPRDLISRINVIVLELKGSETTFMCEYADETATIVEFLNRWITFSQSIISTLTDKTHTCPPCPAPELLGGPSVFLFPPKPKDTLMISRTPEVTCVVVDVSHEDPEVKFNWYVDGVEVHNAKTKPREEQYASTYRVVSVLTVLHQDWLNGKEYKCKVSNKALPAPIEKTISKAKGQPREPQVYTLPPSRDELTKNQVSLTCLVKGFYPSDIAVEWESNGQPENNYKTTPPVLDSDGSFFLYSKLTVDKSRWQQGNVFSCSVMHEALHNHYTQKSLSLSPG

SEQ ID NO: 10 - protein, 364 aa, Artificial Sequence
  Description of Artificial Sequence: Synthetic polypeptide
APTSSSTKKTQLQLEHLLLDLQMILNGINNYKNPKLTRMLTFKFYMPKKATELKHLQCLEEELKPLEEVLNLAQSKNFHLRPRDLISRINVIVLELKGSETTFMCEYADETATIVEFLNRWITFSQSIISTLTGGGGSDKTHTCPPCPAPELLGGPSVFLFPPKPKDTLMISRTPEVTCVVVDVSHEDPEVKFNWYVDGVEVHNAKTKPREEQYASTYRVVSVLTVLHQDWLNGKEYKCKVSNKALPAPIEKTISKAKGQPREPQVYTLPPSRDELTKNQVSLTCLVKGFYPSDIAVEWESNGQPENNYKTTPPVLDSDGSFFLYSKLTVDKSRWQQGNVFSCSVMHEALHNHYTQKSLSLSPG

SEQ ID NO: 11 - protein, 369 aa, Artificial Sequence
  Description of Artificial Sequence: Synthetic polypeptide
APTSSSTKKTQLQLEHLLLDLQMILNGINNYKNPKLTRMLTFKFYMPKKATELKHLQCLEEELKPLEEVLNLAQSKNFHLRPRDLISRINVIVLELKGSETTFMCEYADETATIVEFLNRWITFSQSIISTLTGGGGSGGGGSDKTHTCPPCPAPELLGGPSVFLFPPKPKDTLMISRTPEVTCVVVDVSHEDPEVKFNWYVDGVEVHNAKTKPREEQYASTYRVVSVLTVLHQDWLNGKEYKCKVSNKALPAPIEKTISKAKGQPREPQVYTLPPSRDELTKNQVSLTCLVKGFYPSDIAVEWESNGQPENNYKTTPPVLDSDGSFFLYSKLTVDKSRWQQGNVFSCSVMHEALHNHYTQKSLSLSPG

SEQ ID NO: 12 - protein, 374 aa, Artificial Sequence
  Description of Artificial Sequence: Synthetic polypeptide
APTSSSTKKTQLQLEHLLLDLQMILNGINNYKNPKLTRMLTFKFYMPKKATELKHLQCLEEELKPLEEVLNLAQSKNFHLRPRDLISRINVIVLELKGSETTFMCEYADETATIVEFLNRWITFSQSIISTLTGGGGSGGGGSGGGGSDKTHTCPPCPAPELLGGPSVFLFPPKPKDTLMISRTPEVTCVVVDVSHEDPEVKFNWYVDGVEVHNAKTKPREEQYASTYRVVSVLTVLHQDWLNGKEYKCKVSNKALPAPIEKTISKAKGQPREPQVYTLPPSRDELTKNQVSLTCLVKGFYPSDIAVEWESNGQPENNYKTTPPVLDSDGSFFLYSKLTVDKSRWQQGNVFSCSVMHEALHNYHTQKSLSLSPG

SEQ ID NO: 13 - protein, 379 aa, Artificial Sequence
  Description of Artificial Sequence: Synthetic polypeptide
APTSSSTKKTQLQLEHLLLDLQMILNGINNYKNPKLTRMLTFKFYMPKKATELKHLQCLEEELKPLEEVLNLAQSKNFHLRPRDLISRINVIVLELKGSETTFMCEYADETATIVEFLNRWITFSQSIISTLTGGGGSGGGGSGGGGSGGGGSDKTHTCPPCPAPELLGGPSVFLFPPKPKDTLMISRTPEVTCVVVDVSHEDPEVKFNWYVDGVEVHNAKTKPREEQYASTYRVVSVLTVLHQDWLNGKEYKCKVSNKALPAPIEKTISKAKGQPREPQVYTLPPSRDELTKNQVSLTCLVKGFYPSDIAVEWESNGQPENNYKTTPPVLDSDGSFFLYSKLTVDKSRWQQGNVFSCSVMHEALHNHYTQKSLSLSPG

SEQ ID NO: 14 - protein, 374 aa, Artificial Sequence
  Description of Artificial Sequence: Synthetic polypeptide
APTSSSTKKTQLQLEHLLLHLQMILNGINNYKNPKLTRMLTFKFYMPKKATELKHLQCLEEELKPLEEVLNLAQSKNFHLRPRDLISNINVIVLELKGSETTFMCEYADETATIVEFLNRWITFSQSIISTLTGGGGSGGGGSGGGGSDKTHTCPPCPAPELLGGPSVFLFPPKPKDTLMISRTPEVTCVVVDVSHEDPEVKFNWYVDGVEVHNAKTKPREEQYASTYPVVSVLTVLHQDWLNGKEYKCKVSNKALPAPIEKTISKAKGQPREPQVYTLPPSRDELTKNQVSLTCLVKGFYPSDIAVEWESNGQPENNYKTTPPVLDSDGSFFLYSKLTVDKSRWQQGNVFSCSVMHEALHNHYTQKSLSLSPG

SEQ ID NO: 15 - protein, 153 aa, Artificial Sequence
  Description of Artificial Sequence: Synthetic polypeptide
MYRMQLLSCIALSLALVTNSAPTSSSTKKTQLQLEHLLLDLQMILNGINNYKNPKLTRMLTFKFYMPKKATELKHLQCLEEELKPLEEVLNLAQSKNFHLRPRDLISNINVIVLELKGSETTFMCEYADETATIVEFLNRWITFCQSIISTLT

SEQ ID NO: 16 - protein, 153 aa, Artificial Sequence
  Description of Artificial Sequence: Synthetic polypeptide
MYRMQLLSCIALSLALVTNSAPTSSSTKKTQLQLEHLLLDLQMILNGISNHKNPRLARMLTFKFYMPEKATEIKHLQCLEEELKPLEEALRLAPSKNFHLRPRDLISDINVIVLELKGSETTFMCEYADETATIVEFLNRWITFSQSIISTLT

SEQ ID NO: 17 - protein, 153 aa, Artificial Sequence
  Description of Artificial Sequence: Synthetic polypeptide
MYRMQLLSCIALSLALVTNSAPTSSSTKKTQLQLEHLLLDLQMILNGISNHKNPRLARMLTFKFYMPEKATELKHIQCLEEELKPLEEALRLAPSKNFHLRPRDLISDINVIVLELKGSETTFMCEYADETATIVEFLNRWITFSQSIISTLT

SEQ ID NO: 18 - protein, 153 aa, Artificial Sequence
  Description of Artificial Sequence: Synthetic polypeptide
MYRMQLLSCIALSLALVTNSAPTSSSTKKTQLQLEHLLLDLQMILNGISNHKNPRLARMLTFKFYMPEKATELKHLQCLEEELKPLEEALRLAPSKNFHIRPRDLISDINVIVLELKGSETTFMCEYADETATIVEFLNRWITFSQSIISTLT

SEQ ID NO: 19 - protein, 153 aa, Artificial Sequence
  Description of Artificial Sequence: Synthetic polypeptide
MYRMQLLSCIALSLALVTNSAPTSSSTKKTQLQLEHLLLDLQMILNGISNHKNPRLARMLTFKFYMPEKATELKHLQCLEEELKPLEEALRLAPSKNFHLRPRDLISDINVIVLELKGSETTFMCEYADETATIVEFINRWITFSQSIISTLT

SEQ ID NO: 20 - protein, 20 aa, Artificial Sequence
  Description of Artificial Sequence: Synthetic peptide
MYRMQLLSCIALSLALVTNS

SEQ ID NO: 21 - protein, 226 aa, Artificial Sequence
  Description of Artificial Sequence: Synthetic polypeptide
DKTHTCPPCPAPEAAGAPSVFLFPPKPKDTLMISRTPEVTCVVVDVSHEDPEVKFNWYVDGVEVHNAKTKPREEQYNSTYRVVSVLTVLHQDWLNGKEYKCKVSNKALPAPIEKTISKAKGQPREPQVYTLPPSREEMTKNQVSLTCLVKGFYPSDIAVEWESNGQPENNYKTTPPVLDSDGSFFLYSKLTVDKSRWQQGNVFSCSVMHEALHNHYTQKSLSLSPG

SEQ ID NO: 22 - protein, 20 aa, Artificial Sequence
  Description of Artificial Sequence: Synthetic peptide
GGGGSGGGGSGGGGSGGGGS

SEQ ID NO: 23 - protein, 5 aa, Artificial Sequence
  Description of Artificial Sequence: Synthetic peptide
GGGGS

SEQ ID NO: 24 - protein, 399 aa, Artificial Sequence
  Description of Artificial Sequence: Synthetic polypeptide
MYRMQLLSCIALSLALVTNSAPTSSSTKKTQLQLEHLLLDLQMILNGISNHKNPRLARMLTFKFYMPEKATEIKHLQCLEEELKPLEEALRLAPSKNFHLRPRDLISDINVIVLELKGSETTFMCEYADETATIVEFLNRWITFSQSIISTLTGGGGSGGGGSGGGGSGGGGSDKTHTCPPCPAPEAAGAPSVFLFPPKPKDTLMISRTPEVTCVVVDVSHEDPEVKFNWYVDGVEVHNAKTKPREEQYNSTYRVVSVLTVLHQDWLNGKEYKCKVSNKALPAPIEKTISKAKGQPREPQVYTLPPSREEMTKNQVSLTCLVKGFYPSDIAVEWESNGQPENNYKTTPPVLDSDGSFFLYSKLTVDKSRWQQGNVFSCSVMHEALHNHYTQKSLSLSPG

SEQ ID NO: 25 - protein, 399 aa, Artificial Sequence
  Description of Artificial Sequence: Synthetic polypeptide
MYRMQLLSCIALSLALVTNSAPTSSSTKKTQLQLEHLLLDLQMILNGISNHKNPRLARMLTFKFYMPEKATELKHIQCLEEELKPLEEALRLAPSKNFHLRPRDLISDINVIVLELKGSETTFMCEYADETATIVEFLNRWITFSQSIISTLTGGGGSGGGGSGGGGSGGGGSDKTHTCPPCPAPEAAGAPSVFLFPPKPKDTLMISRTPEVTCVVVDVSHEDPEVKFNWYVDGVEVHNAKTKPREEQYNSTYRVVSVLTVLHQDWLNGKEYKCKVSNKALPAPIEKTISKAKGQPREPQVYTLPPSREEMTKNQVSLTCLVKGFYPSDIAVEWESNGQPENNYKTTPPVLDSDGSFFLYSKLTVDKSRWQQGNVFSCSVMHEALHNHYTQKSLSLSPG

SEQ ID NO: 26 - protein, 399 aa, Artificial Sequence
  Description of Artificial Sequence: Synthetic polypeptide
MYRMQLLSCIALSLALVTNSAPTSSSTKKTQLQLEHLLLDLQMILNGISNHKNPRLARMLTFKFYMPEKATELKHLQCLEEELKPLEEALRLAPSKNFHIRPRDLISDINVIVLELKGSETTFMCEYADETATIVEFLNRWITFSQSIISTLTGGGGSGGGGSGGGGSGGGGSDKTHTCPPCPAPEAAGAPSVFLFPPKPKDTLMISRTPEVTCVVVDVSHEDPEVKFNWYVDGVEVHNAKTKPREEQYNSTYRVVSVLTVLHQDWLNGKEYKCKVSNKALPAPIEKTISKAKGQPREPQVYTLPPSREEMTKNQVSLTCLVKGFYPSDIAVEWESNGQPENNYKTTPPVLDSDGSFFLYSKLTVDKSRWQQGNVFSCSVMHEALHNHYTQKSLSLSPG

SEQ ID NO: 27 - protein, 399 aa, Artificial Sequence
  Description of Artificial Sequence: Synthetic polypeptide
MYRMQLLSCIALSLALVTNSAPTSSSTKKTQLQLEHLLLDLQMILNGISNHKNPRLARMLTFKFYMPEKATELKHLQCLEEELKPLEEALRLAPSKNFHLRPRDLISDINVIVLELKGSETTFMCEYADETATIVEFINRWITFSQSIISTLTGGGGSGGGGSGGGGSGGGGSDKTHTCPPCPAPEAAGAPSVFLFPPKPKDTLMISRTPEVTCVVVDVSHEDPEVKFNWYVDGVEVHNAKTKPREEQYNSTYRVVSVLTVLHQDWLNGKEYKCKVSNKALPAPIEKTISKAKGQPREPQVYTLPPSREEMTKNQVSLTCLVKGFYPSDIAVEWESNGQPENNYKTTPPVLDSDGSFFLYSKLTVDKSRWQQGNVFSCSVMHEALHNHYTQKSLSLSPG

SEQ ID NO: 28 - protein, 226 aa, Artificial Sequence
  Description of Artificial Sequence: Synthetic polypeptide
DKTHTCPPCPAPELLGGPSVFLFPPKPKDTLMISRTPEVTCVVVDVSHEDPEVKFNWYVDGVEVHNAKTKPREEQYNSTYRVVSVLTVLHQDWLNGKEYKCKVSNKALPAPIEKTISKAKGQPREPQVYTLPPSREEMTKNQVSLTCLVKGFYPSDIAVEWESNGQPENNYKTTPPVLDSDGSFFLYSKLTVDKSRWQQGNVFSCSVMHEALHNHYTQKSLSLSPG

SEQ ID NO: 29 - protein, 5 aa, Artificial Sequence
  Description of Artificial Sequence: Synthetic peptide
GGGGA

SEQ ID NO: 30 - protein, 15 aa, Artificial Sequence
  Description of Artificial Sequence: Synthetic peptide
GGGGSGGGGSGGGGS

SEQ ID NO: 31 - protein, 133 aa, Artificial Sequence
  Description of Artificial Sequence: Synthetic polypeptide
APTSSSTKKTQLQLEHLLLDLQMILNGINNYKNPKLTRMLTFKFYMPKKATELKHLQCLEEELKPLEEVLNLAQSKNFHLRPRDLISNINVIVLELKGSETTFMCEYADETATIVEFLNRWITFSQSIISTLT

SEQ ID NO: 32 - protein, 133 aa, Artificial Sequence
  Description of Artificial Sequence: Synthetic polypeptide
APASSSTKKTQLQLEHLLLDLQMILNGINNYKNPKLTRMLTFKFYMPKKATELKHLQCLEEELKPLEEVLNLAQSKNFHLRPRDLISNINVIVLELKGSETTFMCEYADETATIVEFLNRWITFSQSIISTLT

SEQ ID NO: 33 - protein, 133 aa, Artificial Sequence
  Description of Artificial Sequence: Synthetic polypeptide
APTSSSTKKTQLQLEHLLLDLQMILNGINNYKNPKLTRMLTFKFYMPKKATELKHLQCLEEELKPLEEVLNLAQSKNFHLRPRDLISRINVIVLELKGSETTFMCEYADETATIVEFLNRWITFSQSIISTLT

SEQ ID NO: 34 - protein, 133 aa, Artificial Sequence [sequence omitted]

SEQ ID NO: 35 - protein, 133 aa, Artificial Sequence
  Description of Artificial Sequence: Synthetic polypeptide
APTSSSTKKTQLQLEHLLLDLQMILNGINNYKNPKLTRMLTFKFYMPKKATELKHLQCLEEELKPLEEALNLAPSKNFHLRPRDLISDINVIVLELKGSETTFMCEYADETATIVEFLNRWITFSQSIISTLT

SEQ ID NO: 36 - protein, 133 aa, Artificial Sequence
  Description of Artificial Sequence: Synthetic polypeptide
APTSSSTKKTQLQLEHLLLDLQMILNGINNYKNPKLTRMLTFKFYMPKKATELKHLQCLEEELKPLEEALNLAPSKNFHLRPRDLISRINVIVLELKGSETTFMCEYADETATIVEFLNRWITFSQSIISTLT

SEQ ID NO: 37 - protein, 133 aa, Artificial Sequence
  Description of Artificial Sequence: Synthetic polypeptide
APTSSSTKKTQLQLEHLLLDLQMILNGINNYKNPKLTRMLTFKFYMPKKATELKHLQCLEEELKPLEEVLNLAQSKNFHLRPRDLISDINVIVLELKGSETTFMCEYADETATIVEFLNRWITFSQSIISTLT

SEQ ID NO: 38 - protein, 133 aa, Artificial Sequence
  Description of Artificial Sequence: Synthetic polypeptide
APTSSSTKKTQLQLEHLLLDLQMILNGINNYKNPKLTRMLTFKFYMPKKATEIKHLQCLEEELKPLEEALNLAPSKNFHLRPRDLISDINVIVLELKGSETTFMCEYADETATIVEFLNRWITFSQSIISTLT

SEQ ID NO: 39 - protein, 133 aa, Artificial Sequence
  Description of Artificial Sequence: Synthetic polypeptide
APTSSSTKKTQLQLEHLLLDLQMILNGINNYKNPKLTRMLTFKFYMPKKATELKHIQCLEEELKPLEEALNLAPSKNFHLRPRDLISDINVIVLELKGSETTFMCEYADETATIVEFLNRWITFSQSIISTLT

SEQ ID NO: 40 - protein, 133 aa, Artificial Sequence
  Description of Artificial Sequence: Synthetic polypeptide
APTSSSTKKTQLQLEHLLLDLQMILNGINNYKNPKLTRMLTFKFYMPKKATELKHLQCLEEELKPLEEALNLAPSKNFHIRPRDLISDINVIVLELKGSETTFMCEYADETATIVEFLNRWITFSQSIISTLT

SEQ ID NO: 41 - protein, 133 aa, Artificial Sequence
  Description of Artificial Sequence: Synthetic polypeptide
APTSSSTKKTQLQLEHLLLDLQMILNGINNYKNPKLTRMLTFKFYMPKKATELKHLQCLEEELKPLEEALNLAPSKNFHLRPRDLISDINVIVLELKGSETTFMCEYADETATIVEFINRWITFSQSIISTLT

SEQ ID NO: 42 - protein, 585 aa, Artificial Sequence [sequence omitted]

SEQ ID NO: 43 - protein, 226 aa, Artificial Sequence
  Description of Artificial Sequence: Synthetic polypeptide
DKTHTCPPCPAPELLGGPSVFLFPPKPKDTLMISRTPEVTCVVVDVSHEDPEVKFNWYVDGVEVHNAKTKPREEQYGSTYRVVSVLTVLHQDWLNGKEYKCKVSNKALPAPIEKTISKAKGQPREPQVYTLPPSREEMTKNQVSLTCLVKGFYPSDIAVEWESNGQPENNYKTTPPVLDSDGSFFLYSKLTVDKSRWQQGNVFSCSVMHEALHNHYTQKSLSLSPG

SEQ ID NO: 44 - protein, 329 aa, Artificial Sequence
  Description of Artificial Sequence: Synthetic polypeptide
ASTKGPSVFPLAPSSKSTSGGTAALGCLVKDYFPEPVTVSWNSGALTSGVHTFPAVLQSSGLYSLSSVVTVPSSSLGTQTYICNVNHKPSNTKVDKKVEPKSCDKTHTCPPCPAPEAAGAPSVFLFPPKPKDTLMISRTPEVTCVVVDVSHEDPEVKFNWYVDGVEVHNAKTKPREEQYNSTYRVVSVLTVLHQDWLNGKEYKCKVSNKALPAPIEKTISKAKGQPREPQVYTLPPSREEMTKNQVSLTCLVKGFYPSDIAVEWESNGQPENNYKTTPPVLDSDGSFFLYSKLTVDKSRWQQGNVFSCSVMHEALHNHYTQKSLSLSPG

SEQ ID NO: 45 - protein, 107 aa, Artificial Sequence [sequence omitted]

SEQ ID NO: 46 - protein, 374 aa, Artificial Sequence
  Description of Artificial Sequence: Synthetic polypeptide
APTSSSTKKTQLQLEHLLLDLQMILNGINNYKNPKLTRMLTFKFYMPKKATELKHLQCLEEELKPLEEVLNLAQSKNFHLRPRDLISNINVIVLELKGSETTFMCEYADETATIVEFLNRWITFSQSIISTLTGGGGSGGGGSGGGGSDKTHTCPPCPAPEAAGAPSVFLFPPKPKDTLMISRTPEVTCVVVDVSHEDPEVKFNWYVDGVEVHNAKTKPREEQYNSTYRVVSVLTVLHQDWLNGKEYKCKVSNKALPAPIEKTISKAKGQPREPQVYTLPPSREEMTKNQVSLTCLVKGFYPSDIAVEWESNGQPENNYKTTPPVLDSDGSFFLYSKLTVDKSRWQQGNVFSCSVMHEALHNHYTQKSLSLSPG

SEQ ID NO: 47 - protein, 374 aa, Artificial Sequence
  Description of Artificial Sequence: Synthetic polypeptide
APASSSTKKTQLQLEHLLLDLQMILNGINNYKNPKLTRMLTFKFYMPKKATELKHLQCLEEELKPLEEVLNLAQSKNFHLRPRDLISNINVIVLELKGSETTFMCEYADETATIVEFLNRWITFSQSIISTLTGGGGSGGGGSGGGGSDKTHTCPPCPAPEAAGAPSVFLFPPKPKDTLMISRTPEVTCVVVDVSHEDPEVKFNWYVDGVEVHNAKTKPREEQYNSTYRVVSVLTVLHQDWLNGKEYKCKVSNKALPAPIEKTISKAKGQPREPQVYTLPPSREEMTKNQVSLTCLVKGFYPSDIAVEWESNGQPENNYKTTPPVLDSDGSFFLYSKLTVDKSRWQQGNVFSCSVMHEALHNHYTQKSLSLSPG

SEQ ID NO: 48 - protein, 374 aa, Artificial Sequence
  Description of Artificial Sequence: Synthetic polypeptide
APTSSSTKKTQLQLEHLLLDLQMILNGINNYKNPKLTRMLTFKFYMPKKATELKHLQCLEEELKPLEEVLNLAQSKNFHLRPRDLISRINVIVLELKGSETTFMCEYADETATIVEFLNRWITFSQSIISTLTGGGGSGGGGSGGGGSDKTHTCPPCPAPEAAGAPSVFLFPPKPKDTLMISRTPEVTCVVVDVSHEDPEVKFNWYVDGVEVHNAKTKPREEQYNSTYRVVSVLTVLHQDWLNGKEYKCKVSNKALPAPIEKTISKAKGQPREPQVYTLPPSREEMTKNQVSLTCLVKGFYPSDIAVEWESNGQPENNYKTTPPVLDSDGSFFLYSKLTVDKSRWQQGNVFSCSVMHEALHNHYTQKSLSLSPG

SEQ ID NO: 49 - protein, 374 aa, Artificial Sequence
  Description of Artificial Sequence: Synthetic polypeptide
APTSSSTKKTQLQLEHLLLDLQMILNGINNYKNPKLTRMLTFKFYMPKKATELKHLQCLEEELKPLEEALNLAPSKNFHLRPRDLISNINVIVLELKGSETTFMCEYADETATIVEFLNRWITFSQSIISTLTGGGGSGGGGSGGGGSDKTHTCPPCPAPEAAGAPSVFLFPPKPKDTLMISRTPEVTCVVVDVSHEDPEVKFNWYVDGVEVHNAKTKPREEQYNSTYRVVSVLTVLHQDWLNGKEYKCKVSNKALPAPIEKTISKAKGQPREPQVYTLPPSREEMTKNQVSLTCLVKGFYPSDIAVEWESNGQPENNYKTTPPVLDSDGSFFLYSKLTVDKSRWQQGNVFSCSVMHEALHNHYTQKSLSLSPG

SEQ ID NO: 50 - protein, 374 aa, Artificial Sequence
  Description of Artificial Sequence: Synthetic polypeptide
APTSSSTKKTQLQLEHLLLDLQMILNGINNYKNPKLTRMLTFKFYMPKKATELKHLQCLEEELKPLEEALNLAPSKNFHLRPRDLISDINVIVLELKGSETTFMCEYADETATIVEFLNRWITFSQSIISTLTGGGGSGGGGSGGGGSDKTHTCPPCPAPEAAGAPSVFLFPPKPKDTLMISRTPEVTCVVVDVSHEDPEVKFNWYVDGVEVHNAKTKPREEQYNSTYRVVSVLTVLHQDWLNGKEYKCKVSNKALPAPIEKTISKAKGQPREPQVYTLPPSREEMTKNQVSLTCLVKGFYPSDIAVEWESNGQPENNYKTTPPVLDSDGSFFLYSKLTVDKSRWQQGNVFSCSVMHEALHNHYTQKSLSLSPG

SEQ ID NO: 51 - protein, 374 aa, Artificial Sequence
  Description of Artificial Sequence: Synthetic polypeptide
APTSSSTKKTQLQLEHLLLDLQMILNGINNYKNPKLTRMLTFKFYMPKKATELKHLQCLEEELKPLEEALNLAPSKNFHLRPRDLISRINVIVLELKGSETTFMCEYADETATIVEFLNRWITFSQSIISTLTGGGGSGGGGSGGGGSDKTHTCPPCPAPEAAGAPSVFLFPPKPKDTLMISRTPEVTCVVVDVSHEDPEVKFNWYVDGVEVHNAKTKPREEQYNSTYRVVSVLTVLHQDWLNGKEYKCKVSNKALPAPIEKTISKAKGQPREPQVYTLPPSREEMTKNQVSLTCLVKGFYPSDIAVEWESNGQPENNYKTTPPVLDSDGSFFLYSKLTVDKSRWQQGNVFSCSVMHEALHNHYTQKSLSLSPG

SEQ ID NO: 52 - protein, 374 aa, Artificial Sequence
  Description of Artificial Sequence: Synthetic polypeptide
APTSSSTKKTQLQLEHLLLDLQMILNGINNYKNPKLTRMLTFKFYMPKKATELKHLQCLEEELKPLEEVLNLAQSKNFHLRPRDLISDINVIVLELKGSETTFMCEYADETATIVEFLNRWITFSQSIISTLTGGGGSGGGGSGGGGSDKTHTCPPCPAPEAAGAPSVFLFPPKPKDTLMISRTPEVTCVVVDVSHEDPEVKFNWYVDGVEVHNAKTKPREEQYNSTYRVVSVLTVLHQDWLNGKEYKCKVSNKALPAPIEKTISKAKGQPREPQVYTLPPSREEMTKNQVSLTCLVKGFYPSDIAVEWESNGQPENNYKTTPPVLDSDGSFFLYSKLTVDKSRWQQGNVFSCSVMHEALHNHYTQKSLSLSPG

SEQ ID NO: 53 - protein, 379 aa, Artificial Sequence
  Description of Artificial Sequence: Synthetic polypeptide
APTSSSTKKTQLQLEHLLLDLQMILNGINNYKNPKLTRMLTFKFYMPKKATEIKHLQCLEEELKPLEEALNLAPSKNFHLRPRDLISDINVIVLELKGSETTFMCEYADETATIVEFLNRWITFSQSIISTLTGGGGSGGGGSGGGGSGGGGSDKTHTCPPCPAPEAAGAPSVFLFPPKPKDTLMISRTPEVTCVVVDVSHEDPEVKFNWYVDGVEVHNAKTKPREEQYNSTYRVVSVLTVLHQDWLNGKEYKCKVSNKALPAPIEKTISKAKGQPREPQVYTLPPSREEMTKNQVSLTCLVKGFYPSDIAVEWESNGQPENNYKTTPPVLDSDGSFFLYSKLTVDKSRWQQGNVFSCSVMHEALHNHYTQKSLSLSPG

SEQ ID NO: 54 - protein, 379 aa, Artificial Sequence
  Description of Artificial Sequence: Synthetic polypeptide
APTSSSTKKTQLQLEHLLLDLQMILNGINNYKNPKLTRMLTFKFYMPKKATELKHIQCLEEELKPLEEALNLAPSKNFHLRPRDLISDINVIVLELKGSETTFMCEYADETATIVEFLNRWITFSQSIISTLTGGGGSGGGGSGGGGSGGGGSDKTHTCPPCPAPEAAGAPSVFLFPPKPKDTLMISRTPEVTCVVVDVSHEDPEVKFNWYVDGVEVHNAKTKPREEQYNSTYRVVSVLTVLHQDWLNGKEYKCKVSNKALPAPIEKTISKAKGQPREPQVYTLPPSREEMTKNQVSLTCLVKGFYPSDIAVEWESNGQPENNYKTTPPVLDSDGSFFLYSKLTVDKSRWQQGNVFSCSVMHEALHNHYTQKSLSLSPG

SEQ ID NO: 55 - protein, 379 aa, Artificial Sequence
  Description of Artificial Sequence: Synthetic polypeptide
APTSSSTKKTQLQLEHLLLDLQMILNGINNYKNPKLTRMLTFKFYMPKKATELKHLQCLEEELKPLEEALNLAPSKNFHIRPRDLISDINVIVLELKGSETTFMCEYADETATIVEFLNRWITFSQSIISTLTGGGGSGGGGSGGGGSGGGGSDKTHTCPPCPAPEAAGAPSVFLFPPKPKDTLMISRTPEVTCVVVDVSHEDPEVKFNWYVDGVEVHNAKTKPREEQYNSTYRVVSVLTVLHQDWLNGKEYKCKVSNKALPAPIEKTISKAKGQPREPQVYTLPPSREEMTKNQVSLTCLVKGFYPSDIAVEWESNGQPENNYKTTPPVLDSDGSFFLYSKLTVDKSRWQQGNVFSCSVMHEALHNHYTQKSLSLSPG

SEQ ID NO: 56 - protein, 379 aa, Artificial Sequence
  Description of Artificial Sequence: Synthetic polypeptide
APTSSSTKKTQLQLEHLLLDLQMILNGINNYKNPKLTRMLTFKFYMPKKATELKHLQCLEEELKPLEEALNLAPSKNFHLRPRDLISDINVIVLELKGSETTFMCEYADETATIVEFINRWITFSQSIISTLTGGGGSGGGGSGGGGSGGGGSDKTHTCPPCPAPEAAGAPSVFLFPPKPKDTLMISRTPEVTCVVVDVSHEDPEVKFNWYVDGVEVHNAKTKPREEQYNSTYRVVSVLTVLHQDWLNGKEYKCKVSNKALPAPIEKTISKAKGQPREPQVYTLPPSREEMTKNQVSLTCLVKGFYPSDIAVEWESNGQPENNYKTTPPVLDSDGSFFLYSKLTVDKSRWQQGNVFSCSVMHEALHNHYTQKSLSLSPG

SEQ ID NO: 57 - protein, 379 aa, Artificial Sequence
  Description of Artificial Sequence: Synthetic polypeptide
APTSSSTKKTQLQLEHLLLDLQMILNGINNYKNPKLTRMLTFKFYMPKKATELKHLQCLEEELKPLEEALNLAPSKNFHLRPRDLISDINVIVLELKGSETTFMCEYADETATIVEFLNRWITFSQSIISTLTGGGGSGGGGSGGGGSGGGGSDKTHTCPPCPAPEAAGAPSVFLFPPKPKDTLMISRTPEVTCVVVDVSHEDPEVKFNWYVDGVEVHNAKTKPREEQYNSTYRVVSVLTVLHQDWLNGKEYKCKVSNKALPAPIEKTISKAKGQPREPQVYTLPPSREEMTKNQVSLTCLVKGFYPSDIAVEWESNGQPENNYKTTPPVLDSDGSFFLYSKLTVDKSRWQQGNVFSCSVMHEALHNHYTQKSLSLSPG

SEQ ID NO: 58 - protein, 364 aa, Artificial Sequence
  Description of Artificial Sequence: Synthetic polypeptide
DKTHTCPPCPAPELLGGPSVFLFPPKPKDTLMISRTPEVTCVVVDVSHEDPEVKFNWYVDGVEVHNAKTKPREEQYGSTYRVVSVLTVLHQDWLNGKEYKCKVSNKALPAPIEKTISKAKGQPREPQVYTLPPSREEMTKNQVSLTCLVKGFYPSDIAVEWESNGQPENNYKTTPPVLDSDGSFFLYSKLTVDKSRWQQGNVFSCSVMHEALHNHYTQKSLSLSPGGGGGSAPTSSSTKKTQLQLEHLLLDLQMILNGINNYKNPKLTRMLTFKFYMPKKATELKHLQCLEEELKPLEEALNLAPSKNFHLRPRDLISDINVIVLELKGSETTFMCEYADETATIVEFLNRWITFAQSIISTLT

SEQ ID NO: 59 - protein, 379 aa, Artificial Sequence
  Description of Artificial Sequence: Synthetic polypeptide
  MOD_RES (53)..(53): L or I
  MOD_RES (56)..(56): L or I
  MOD_RES (80)..(80): L or I
  MOD_RES (118)..(118): L or I
  See specification as filed for detailed description of substitutions and preferred embodiments
APTSSSTKKTQLQLEHLLLDLQMILNGINNYKNPKLTRMLTFKFYMPKKATEXKHXQCLEEELKPLEEALNLAPSKNFHXRPRDLISDINVIVLELKGSETTFMCEYADETATIVEFXNRWITFSQSIISTLTGGGGSGGGGSGGGGSGGGGSDKTHTCPPCPAPEAAGAPSVFLFPPKPKDTLMISRTPEVTCVVVDVSHEDPEVKFNWYVDGVEVHNAKTKPREEQYNSTYRVVSVLTVLHQDWLNGKEYKCKVSNKALPAPIEKTISKAKGQPREPQVYTLPPSREEMTKNQVSLTCLVKGFYPSDIAVEWESNGQPENNYKTTPPVLDSDGSFFLYSKLTVDKSRWQQGNVFSCSVMHEALHNHYTQKSLSLSPG

SEQ ID NO: 60 - protein, 133 aa, Artificial Sequence
  Description of Artificial Sequence: Synthetic polypeptide
  MOD_RES (53)..(53): L or I
  MOD_RES (56)..(56): L or I
  MOD_RES (80)..(80): L or I
  MOD_RES (118)..(118): L or I
  See specification as filed for detailed description of substitutions and preferred embodiments
APTSSSTKKTQLQLEHLLLDLQMILNGINNYKNPKLTRMLTFKFYMPKKATEXKHXQCLEEELKPLEEALNLAPSKNFHXRPRDLISDINVIVLELKGSETTFMCEYADETATIVEFXNRWITFSQSIISTLT

SEQ ID NO: 61 - protein, 9 aa, Artificial Sequence
  Description of Artificial Sequence: Synthetic peptide
FTFSSYGMH

SEQ ID NO: 62 - protein, 13 aa, Artificial Sequence
  Description of Artificial Sequence: Synthetic peptide
AVISDDGSDKYYA

SEQ ID NO: 63 - protein, 15 aa, Artificial Sequence
  Description of Artificial Sequence: Synthetic peptide
CTTSKYYYYYGMDVW

SEQ ID NO: 64 - protein, 11 aa, Artificial Sequence
  Description of Artificial Sequence: Synthetic peptide
QASQDISKSLN

SEQ ID NO: 65 - protein, 7 aa, Artificial Sequence
  Description of Artificial Sequence: Synthetic peptide
AASSLQS

SEQ ID NO: 66 - protein, 11 aa, Artificial Sequence [sequence omitted]

SEQ ID NO: 67 - protein, 247 aa, Artificial Sequence
  Description of Artificial Sequence: Synthetic polypeptide
EVQLLESGGGLVQPGGSLRLSCAASGFTFSSYGMHWVRQAPGKGLEWVAVISDDGSDKYYADSVKGRFTISRDNSKNTLYLQMNSLRAEDTAVYYCTTSKYYYYYGMDVWGQGTTVTVSSGGGGSGGGGSGGGGSGGGGSDIQMTQSPSSLSASVGDRVTITCQASQDISKSLNWYQQKPGKAPKLLIYAASSLQSGVPSRFSGSGSGTDFTLTISSLQPEDFATYYCQQGYSTPLTFGGGTKVEIK

SEQ ID NO: 68 - protein, 9 aa, Artificial Sequence
  Description of Artificial Sequence: Synthetic peptide
YPFIGYYLH

SEQ ID NO: 69 - protein, 13 aa, Artificial Sequence
  Description of Artificial Sequence: Synthetic peptide
GIINPSGGSTSYA

SEQ ID NO: 70 - protein, 14 aa, Artificial Sequence
  Description of Artificial Sequence: Synthetic peptide
CAREGRLSYGMDAW

SEQ ID NO: 71 - protein, 11 aa, Artificial Sequence
  Description of Artificial Sequence: Synthetic peptide
RASQSISSYLA

SEQ ID NO: 72 - protein, 7 aa, Artificial Sequence
  Description of Artificial Sequence: Synthetic peptide
GASTLES

SEQ ID NO: 73 - protein, 11 aa, Artificial Sequence
  Description of Artificial Sequence: Synthetic peptide
CQQTWGPPFTF

SEQ ID NO: 74 - protein, 246 aa, Artificial Sequence
  Description of Artificial Sequence: Synthetic polypeptide
QVQLVQSGAEVKKPGASVKVSCKASGYPFIGYYLHWVRQAPGQGLEWMGIINPSGGSTSYAQKFQGRVTMTRDTSTSTVYMELSSLRSEDTAVYYCAREGRLSYGMDAWGQGTLVTVSSGGGGSGGGGSGGGGSGGGGSDIQMTQSPSSLSASVGDRVTITCRASQSISSYLAWYQQKPGKAPKLLIYGASTLESGVPSRFSGSGSGTDFTLTISSLQPEDFATYYCQQTWGPPFTFGQGTKLEIK

SEQ ID NO: 75 - protein, 9 aa, Artificial Sequence
  Description of Artificial Sequence: Synthetic peptide
YPFIGQYLH

SEQ ID NO: 76 - protein, 246 aa, Artificial Sequence
  Description of Artificial Sequence: Synthetic polypeptide
QVQLVQSGAEVKKPGASVKVSCKASGYPFIGQYLHWVRQAPGQGLEWMGIINPSGGSTSYAQKFQGRVTMTRDTSTSTVYMELSSLRSEDTAVYYCAREGRLSYGMDAWGQGTLVTVSSGGGGSGGGGSGGGGSGGGGSDIQMTQSPSSLSASVGDRVTITCRASQSISSYLAWYQQKPGKAPKLLIYGASTLESGVPSRFSGSGSGTDFTLTISSLQPEDFATYYCQQTWGPPFTFGQGTKLEIK

SEQ ID NO: 77 - protein, 9 aa, Artificial Sequence
  Description of Artificial Sequence: Synthetic peptide
GTFSSYAIS

SEQ ID NO: 78 - protein, 13 aa, Artificial Sequence
  Description of Artificial Sequence: Synthetic peptide
GSINPSGDTTSYA

SEQ ID NO: 79 - protein, 16 aa, Artificial Sequence
  Description of Artificial Sequence: Synthetic peptide
CAKDKAQWLVGYFDYW

SEQ ID NO: 80 - protein, 11 aa, Artificial Sequence
  Description of Artificial Sequence: Synthetic peptide
QASQDISNSLN

SEQ ID NO: 81 - protein, 11 aa, Artificial Sequence
  Description of Artificial Sequence: Synthetic peptide
CQQSYSSVITF

SEQ ID NO: 82 - protein, 248 aa, Artificial Sequence
  Description of Artificial Sequence: Synthetic polypeptide
QVQLVQSGAEVKKPGASVKVSCKASGGTFSSYAISWVRQAPGQGLEWMGSINPSGDTTSYAQKFQGRVTMTRDTSTSTVYMELSSLRSEDTAVYYCAKDKAQWLVGYFDYWGQGTLVTVSSGGGGSGGGGSGGGGSGGGGSDIQMTQSPSSLSASVGDRVTITCQASQDISNSLNWYQQKPGKAPKLLIYAASSLQSGVPSRFSGSGSGTDFTLTISSLQPEDFATYYCQQSYSSVITFGQGTKVEIK

SEQ ID NO: 83 - protein, 9 aa, Artificial Sequence
  Description of Artificial Sequence: Synthetic peptide
FTFSSYWMH

SEQ ID NO: 84 - protein, 13 aa, Artificial Sequence
  Description of Artificial Sequence: Synthetic peptide
SSISPGGSNIDYA

SEQ ID NO: 85 - protein, 13 aa, Artificial Sequence
  Description of Artificial Sequence: Synthetic peptide
CAREVQLSHYDYW

SEQ ID NO: 86 - protein, 11 aa, Artificial Sequence
  Description of Artificial Sequence: Synthetic peptide
RASQGISNSLA

SEQ ID NO: 87 - protein, 7 aa, Artificial Sequence
  Description of Artificial Sequence: Synthetic peptide
GASSLQS

SEQ ID NO: 88 - protein, 11 aa, Artificial Sequence [sequence omitted]

SEQ ID NO: 89 - protein, 245 aa, Artificial Sequence
  Description of Artificial Sequence: Synthetic polypeptide
EVQLLESGGGLVQPGGSLRLSCAASGFTFSSYWMHWVRQAPGKGLEWVSSISPGGSNIDYADSVKGRFTISRDNSKNTLYLQMNSLRAEDTAVYYCAREVQLSHYDYWGQGTLVTVSSGGGGSGGGGSGGGGSGGGGSDIQMTQSPSSLSASVGDRVTITCRASQGISNSLAWYQQKPGKAPKLLIYGASSLQSGVPSRFSGSGSGTDFTLTISSLQPEDFATYYCQQANSFPFTFGQGTKVEIK

SEQ ID NO: 90 - protein, 9 aa, Artificial Sequence
  Description of Artificial Sequence: Synthetic peptide
FTFNNYAFH

SEQ ID NO: 91 - protein, 13 aa, Artificial Sequence
  Description of Artificial Sequence: Synthetic peptide
SRINSYGTSTTYA

SEQ ID NO: 92 - protein, 16 aa, Artificial Sequence
  Description of Artificial Sequence: Synthetic peptide
CAREGPVAGYWYFDLW

SEQ ID NO: 93 - protein, 11 aa, Artificial Sequence
  Description of Artificial Sequence: Synthetic peptide
RASQIIGTNLA

SEQ ID NO: 94 - protein, 11 aa, Artificial Sequence [sequence omitted]

SEQ ID NO: 95 - protein, 248 aa, Artificial Sequence
  Description of Artificial Sequence: Synthetic polypeptide
EVQLLESGGGLVQPGGSLRLSCAASGFTFNNYAFHWVRQAPGKGLEWVSRINSYGTSTTYADSVKGRFTISRDNSKNTLYLQMNSLRAEDTAVYYCAREGPVAGYWYFDLWGQGTLVTVSSGGGGSGGGGSGGGGSGGGGSDIQMTQSPSSLSASVGDRVTITCRASQIIGTNLAWYQQKPGKAPKLLIYGASSLQSGVPSRFSGSGSGTDFTLTISSLQPEDFATYYCQQSYRLPFTFGQGTKVEIK

SEQ ID NO: 96 - protein, 9 aa, Artificial Sequence
  Description of Artificial Sequence: Synthetic peptide
YTFTGYHIH

SEQ ID NO: 97 - protein, 13 aa, Artificial Sequence
  Description of Artificial Sequence: Synthetic peptide
GIINPSGGSTIYA

SEQ ID NO: 98 - protein, 16 aa, Artificial Sequence
  Description of Artificial Sequence: Synthetic peptide
CAKDWSSWYLGPFDYW

SEQ ID NO: 99 - protein, 11 aa, Artificial Sequence
  Description of Artificial Sequence: Synthetic peptide
RASQNISSSLN

SEQ ID NO: 100 - protein, 11 aa, Artificial Sequence [sequence omitted]

SEQ ID NO: 101 - protein, 248 aa, Artificial Sequence
  Description of Artificial Sequence: Synthetic polypeptide
QVQLVQSGAEVKKPGASVKVSCKASGYTFTGYHIHWVRQAPGQGLEWMGIINPSGGSTIYAQKFQGRVTMTRDTSTSTVYMELSSLRSEDTAVYYCAKDWSSWYLGPFDYWGQGTLVTVSSGGGGSGGGGSGGGGSGGGGSDIQMTQSPSSLSASVGDRVTITCRASQNISSSLNWYQQKPGKAPKLLIYAASSLQSGVPSRFSGSGSGTDFTLTISSLQPEDFATYYCQQSYTTPYTFGQGTKVEIK

SEQ ID NO: 102 - protein, 9 aa, Artificial Sequence
  Description of Artificial Sequence: Synthetic peptide
FMFGDYAMH

SEQ ID NO: 103 - protein, 13 aa, Artificial Sequence
  Description of Artificial Sequence: Synthetic peptide
SAISGSGGSTYYA

SEQ ID NO: 104 - protein, 16 aa, Artificial Sequence
  Description of Artificial Sequence: Synthetic peptide
CAKDLVVAGIWYFDLW

SEQ ID NO: 105 - protein, 11 aa, Artificial Sequence
  Description of Artificial Sequence: Synthetic peptide
RASQGISNNLN

SEQ ID NO: 106 - protein, 7 aa, Artificial Sequence
  Description of Artificial Sequence: Synthetic peptide
DASSLES

SEQ ID NO: 107 - protein, 11 aa, Artificial Sequence [sequence omitted]

SEQ ID NO: 108 - protein, 248 aa, Artificial Sequence
  Description of Artificial Sequence: Synthetic polypeptide
EVQLLESGGGLVQPGGSLRLSCAASGFMFGDYAMHWVRQAPGKGLEWVSAISGSGGSTYYADSVKGRFTISRDNSKNTLYLQMNSLRAEDTAVYYCAKDLVVAGIWYFDLWGRGTLVTVSSGGGGSGGGGSGGGGSGGGGSDIQMTQSPSSLSASVGDRVTITCRASQGISNNLNWYQQKPGKAPKLLIYDASSLESGVPSRFSGSGSGTDFTLTISSLQPEDFATYYCQQTHSFPSTFGQGTKLEIK

SEQ ID NO: 109 - protein, 9 aa, Artificial Sequence
  Description of Artificial Sequence: Synthetic peptide
FTFSDYYMN

SEQ ID NO: 110 - protein, 13 aa, Artificial Sequence
  Description of Artificial Sequence: Synthetic peptide
SVIGESGGSTYYA

SEQ ID NO: 111 - protein, 18 aa, Artificial Sequence
  Description of Artificial Sequence: Synthetic peptide
CAADPVSRWPKHGGGDYW

SEQ ID NO: 112 - protein, 11 aa, Artificial Sequence
  Description of Artificial Sequence: Synthetic peptide
RASQGISSSLA

SEQ ID NO: 113 - protein, 7 aa, Artificial Sequence
  Description of Artificial Sequence: Synthetic peptide
AASTLQS

SEQ ID NO: 114 - protein, 11 aa, Artificial Sequence [sequence omitted]

SEQ ID NO: 115 - protein, 250 aa, Artificial Sequence
  Description of Artificial Sequence: Synthetic polypeptide
EVQLLESGGGLVQPGGSLRLSCAASGFTFSDYYMNWVRQAPGKGLEWVSVIGESGGSTYYADSVKGRFTISRDNSKNTLYLQMNSLRAEDTAVYYCAADPVSRWPKHGGGDYWGQGTLVTVSSGGGGSGGGGSGGGGSGGGGSDIQMTQSPSSLSASVGDRVTITCRASQGISSSLAWYQQKPGKAPKLLIYAASTLQSGVPSRFSGSGSGTDFTLTISSLQPEDFATYYCQQSYSTPWTFGQGTKVEIK

SEQ ID NO: 116 - protein, 9 aa, Artificial Sequence
  Description of Artificial Sequence: Synthetic peptide
YTLTTWYMY

SEQ ID NO: 117 - protein, 13 aa, Artificial Sequence
  Description of Artificial Sequence: Synthetic peptide
GWINPNRGATNYA

SEQ ID NO: 118 - protein, 13 aa, Artificial Sequence
  Description of Artificial Sequence: Synthetic peptide
CAKGDLWGAMDVW

SEQ ID NO: 119 - protein, 11 aa, Artificial Sequence
  Description of Artificial Sequence: Synthetic peptide
RASDNIGSWLA

SEQ ID NO: 120 - protein, 11 aa, Artificial Sequence [sequence omitted]

SEQ ID NO: 121 - protein, 245 aa, Artificial Sequence
  Description of Artificial Sequence: Synthetic polypeptide
QVQLVQSGAEVKKPGASVKVSCKASGYTLTTWYMYWVRQAPGQGLEWMGWINPNRGATNYAQKFQGRVTMTRDTSTSTVYMELSSLRSEDTAVYYCAKGDLWGAMDVWGQGTLVTVSSGGGGSGGGGSGGGGSGGGGSDIQMTQSPSSLSASVGDRVTITCRASDNIGSWLAWYQQKPGKAPKLLIYAASSLQSGVPSRFSGSGSGTDFTLTISSLQPEDFATYYCQQGYSTPPTFGQGTKVEIK

SEQ ID NO: 122 - protein, 9 aa, Artificial Sequence
  Description of Artificial Sequence: Synthetic peptide
YTFTTYYMH

SEQ ID NO: 123 - protein, 13 aa, Artificial Sequence
  Description of Artificial Sequence: Synthetic peptide
GGFDPEDGETIYA

SEQ ID NO: 124 - protein, 22 aa, Artificial Sequence
  Description of Artificial Sequence: Synthetic peptide
CARHAVAGAVGAGYYYYGMDVW

SEQ ID NO: 125 - protein, 11 aa, Artificial Sequence
  Description of Artificial Sequence: Synthetic peptide
RASESISNWLA

SEQ ID NO: 126 - protein, 11 aa, Artificial Sequence [sequence omitted]

SEQ ID NO: 127 - protein, 254 aa, Artificial Sequence
  Description of Artificial Sequence: Synthetic polypeptide
QVQLVQSGAEVKKPGASVKVSCKASGYTFTTYYMHWVRQAPGQGLEWMGGFDPEDGETIYAQKFQGRVTMTRDTSTSTVYMELSSLRSEDTAVYYCARHAVAGAVGAGYYYYGMDVWGQGTMVTVSSGGGGSGGGGSGGGGSGGGGSDIQMTQSPSSLSASVGDRVTITCRASESISNWLAWYQQKPGKAPKLLIYAASTLQSGVPSRFSGSGSGTDFTLTISSLQPEDFATYYCQQSYSVPFTFGPGTKVDIK

SEQ ID NO: 128 - protein, 9 aa, Artificial Sequence
  Description of Artificial Sequence: Synthetic peptide
YTFTGYYMH

SEQ ID NO: 129 - protein, 13 aa, Artificial Sequence
  Description of Artificial Sequence: Synthetic peptide
GWIGPNSGDTNYA

SEQ ID NO: 130 - protein, 14 aa, Artificial Sequence
  Description of Artificial Sequence: Synthetic peptide
CARDLDHNWYFDLW

SEQ ID NO: 131 - protein, 16 aa, Artificial Sequence
  Description of Artificial Sequence: Synthetic peptide
RSSQSLLHSNGYNYLD

SEQ ID NO: 132 - protein, 7 aa, Artificial Sequence
  Description of Artificial Sequence: Synthetic peptide
SSSNRAP

SEQ ID NO: 133 - protein, 11 aa, Artificial Sequence [sequence omitted]

SEQ ID NO: 134 - protein, 251 aa, Artificial Sequence
  Description of Artificial Sequence: Synthetic polypeptide
QVQLVQSGAEVKKPGASVKVSCKASGYTFTGYYMHWVRQAPGQGLEWMGWIGPNSGDTNYAQKFQGRVTMTRDTSTSTVYMELSSLRSEDTAVYYCARDLDHNWYFDLWGRGTLVTVSSGGGGSGGGGSGGGGSGGGGSDIVMTQSPLSLPVTPGEPASISCRSSQSLLHSNGYNYLDWYLQKPGQSPQLLIYSSSNRAPGVPDRFSGSGSGTDFTLKISRVEAEDVGVYYCMQALHIPLTFGGGTKVEIK

SEQ ID NO: 135 - protein, 9 aa, Artificial Sequence
  Description of Artificial Sequence: Synthetic peptide
FTFDDYAMH

SEQ ID NO: 136 - protein, 13 aa, Artificial Sequence
  Description of Artificial Sequence: Synthetic peptide
SYIDASGTTIYYA

SEQ ID NO: 137 - protein, 16 aa, Artificial Sequence
  Description of Artificial Sequence: Synthetic peptide
CAKDQAAAGYWYFDLW

SEQ ID NO: 138 - protein, 11 aa, Artificial Sequence
  Description of Artificial Sequence: Synthetic peptide
QASQDISNYLN

SEQ ID NO: 139 - protein, 7 aa, Artificial Sequence
  Description of Artificial Sequence: Synthetic peptide
KASTLES

SEQ ID NO: 140 - protein, 11 aa, Artificial Sequence [sequence omitted]

SEQ ID NO: 141 - protein, 248 aa, Artificial Sequence
  Description of Artificial Sequence: Synthetic polypeptide
EVQLLESGGGLVQPGGSLRLSCAASGFTFDDYAMHWVRQAPGKGLEWVSYIDASGTTIYYADSVKGRFTISRDNSKNTLYLQMNSLRAEDTAVYYCAKDQAAAGYWYFDLWGRGTLVTVSSGGGGSGGGGSGGGGSGGGGSDIQMTQSPSSLSASVGDRVTITCQASQDISNYLNWYQQKPGKAPKLLIYKASTLESGVPSRFSGSGSGTDFTLTISSLQPEDFATYYCQQSYSTPITFGQGTRLEIK

SEQ ID NO: 142 - protein, 9 aa, Artificial Sequence
  Description of Artificial Sequence: Synthetic peptide
YTFTDYHIH

SEQ ID NO: 143 - protein, 13 aa, Artificial Sequence
  Description of Artificial Sequence: Synthetic peptide
GGIVPRSGSTTYA

SEQ ID NO: 144 - protein, 15 aa, Artificial Sequence
  Description of Artificial Sequence: Synthetic peptide
CAKDESSGWYYFDYW

SEQ ID NO: 145 - protein, 7 aa, Artificial Sequence
  Description of Artificial Sequence: Synthetic peptide
SAYNRAS

SEQ ID NO: 146 - protein, 11 aa, Artificial Sequence [sequence omitted]

SEQ ID NO: 147 - protein, 252 aa, Artificial Sequence
  Description of Artificial Sequence: Synthetic polypeptide
QVQLVQSGAEVKKPGSSVKVSCKASGYTFTDYHIHWVRQAPGQGLEWMGGIVPRSGSTTYAQKFQGRVTITADESTSTAYMELSSLRSEDTAVYYCAKDESSGWYYFDYWGQGTLVTVSSGGGGSGGGGSGGGGSGGGGSDIVMTQSPLSLPVTPGEPASISCRSSQSLLHSNGYNYLDWYLQKPGQSPQLLIYSAYNRASGVPDRFSGSGSGTDFTLKISRVEAEDVGVYYCMQALQTPLTFGQGTKVEIK

SEQ ID NO: 148 - protein, 9 aa, Artificial Sequence
  Description of Artificial Sequence: Synthetic peptide
YTFTNYYMH

SEQ ID NO: 149 - protein, 13 aa, Artificial Sequence
  Description of Artificial Sequence: Synthetic peptide
GGIIPIVDRVKYA

SEQ ID NO: 150 - protein, 17 aa, Artificial Sequence
  Description of Artificial Sequence: Synthetic peptide
CAKGRYTVNYYYGMDVW

SEQ ID NO: 151 - protein, 11 aa, Artificial Sequence
  Description of Artificial Sequence: Synthetic peptide
QANQDISNYLN

SEQ ID NO: 152 - protein, 7 aa, Artificial Sequence
  Description of Artificial Sequence: Synthetic peptide
RASKLEA

SEQ ID NO: 153 - protein, 11 aa, Artificial Sequence
  Description of Artificial Sequence: Synthetic peptide
CQQSSEIPYSF

SEQ ID NO: 154 - protein, 249 aa, Artificial Sequence
  Description of Artificial Sequence: Synthetic polypeptide
QVQLVQSGAEVKKPGSSVKVSCKASGYTFTNYYMHWVRQAPGQGLEWMGGIIPIVDRVKYAQKFQGRVTITADESTSTAYMELSSLRSEDTAVYYCAKGRYTVNYYYGMDVWGQGTTVTVSSGGGGSGGGGSGGGGSGGGGSDIQMTQSPSSLSASVGDRVTITCQANQDISNYLNWYQQKPGKAPKLLIYRASKLEAGVPSRFSGSGSGTDFTLTISSLQPEDFATYYCQQSSEIPYSFGQGTKLEIK

SEQ ID NO: 155 - protein, 9 aa, Artificial Sequence
  Description of Artificial Sequence: Synthetic peptide
FTFEDYAMH

SEQ ID NO: 156 - protein, 13 aa, Artificial Sequence
  Description of Artificial Sequence: Synthetic peptide
SYLNSDGGSTSYA

SEQ ID NO: 157 - protein, 16 aa, Artificial Sequence
  Description of Artificial Sequence: Synthetic peptide
CAKDYCTNGVCAFDYW

SEQ ID NO: 158 - protein, 11 aa, Artificial Sequence
  Description of Artificial Sequence: Synthetic peptide
RASQSISTYLN

SEQ ID NO: 159 - protein, 7 aa, Artificial Sequence
  Description of Artificial Sequence: Synthetic peptide
DASNLET

SEQ ID NO: 160 - protein, 11 aa, Artificial Sequence [sequence omitted]

SEQ ID NO: 161 - protein, 248 aa, Artificial Sequence
  Description of Artificial Sequence: Synthetic polypeptide
EVQLLESGGGLVQPGGSLRLSCAASGFTFEDYAMHWVRQAPGKGLEWVSYLNSDGGSTSYADSVKGRFTISRDNSKNTLYLQMNSLRAEDTAVYYCAKDYCTNGVCAFDYWGQGTLVTVSSGGGGSGGGGSGGGGSGGGGSDIQMTQSPSSLSASVGDRVTITCRASQSISTYLNWYQQKPGKAPKLLIYDASNLETGVPSRFSGSGSGTDFTLTISSLQPEDFATYYCQQSYTIPITFGQGTRLEIK

SEQ ID NO: 162 - protein, 9 aa, Artificial Sequence
  Description of Artificial Sequence: Synthetic peptide
FTFSDSAMH

SEQ ID NO: 163 - protein, 13 aa, Artificial Sequence
  Description of Artificial Sequence: Synthetic peptide
SAISGSGSTIYYA

SEQ ID NO: 164 - protein, 16 aa, Artificial Sequence
  Description of Artificial Sequence: Synthetic peptide
CVSDIAVAGHWYFDLW

SEQ ID NO: 165 - protein, 11 aa, Artificial Sequence
  Description of Artificial Sequence: Synthetic peptide
RASQSISTFLN

SEQ ID NO: 166 - protein, 7 aa, Artificial Sequence
  Description of Artificial Sequence: Synthetic peptide
AASRLEG

SEQ ID NO: 167 - protein, 11 aa, Artificial Sequence [sequence omitted]

SEQ ID NO: 168 - protein, 248 aa, Artificial Sequence
  Description of Artificial Sequence: Synthetic polypeptide
EVQLLESGGGLVQPGGSLRLSCAASGFTFSDSAMHWVRQAPGKGLEWVSAISGSGSTIYYADSVKGRFTISRDNSKNTLYLQMNSLRAEDTAVYYCVSDIAVAGHWYFDLWGRGTLVTVSSGGGGSGGGGSGGGGSGGGGSDIQMTQSPSSLSASVGDRVTITCRASQSISTFLNWYQQKPGKAPKLLIYAASRLEGGVPSRFSGSGSGTDFTLTISSLQPEDFATYYCQQANSFPLTFGPGTKVDIK

SEQ ID NO: 169 - protein, 9 aa, Artificial Sequence
  Description of Artificial Sequence: Synthetic peptide
FTFSSYWMS

SEQ ID NO: 170 - protein, 13 aa, Artificial Sequence
  Description of Artificial Sequence: Synthetic peptide
SYISGDSGYTNYA

SEQ ID NO: 171 - protein, 17 aa, Artificial Sequence
  Description of Artificial Sequence: Synthetic peptide
CARANSSGWYDWYFDLW

SEQ ID NO: 172 - protein, 11 aa, Artificial Sequence
  Description of Artificial Sequence: Synthetic peptide
RASQSISSYLN

SEQ ID NO: 173 - protein, 11 aa, Artificial Sequence [sequence omitted]

SEQ ID NO: 174 - protein, 249 aa, Artificial Sequence
  Description of Artificial Sequence: Synthetic polypeptide
EVQLVESGGGLVKPGGSLRLSCAASGFTFSSYWMSWVRQAPGKGLEWVSYISGDSGYTNYAAPVKGRFTISRDDSKNTLYLQMNSLKTEDTAVYYCARANSSGWYDWYFDLWGRGTLVTVSSGGGGSGGGGSGGGGSGGGGSDIQMTQSPSSLSASVGDRVTITCRASQSISSYLNWYQQKPGKAPKLLIYAASSLQSGVPSRFSGSGSGTDFTLTISSLQPEDFATYYCQQSYSTPLTFGGGTKVEIK

SEQ ID NO: 175 - protein, 13 aa, Artificial Sequence
  Description of Artificial Sequence: Synthetic peptide
SGISWNSGSIGYA

SEQ ID NO: 176 - protein, 18 aa, Artificial Sequence
  Description of Artificial Sequence: Synthetic peptide
CAKDIVAAGHYYYGMDVW

SEQ ID NO: 177 - protein, 250 aa, Artificial Sequence
  Description of Artificial Sequence: Synthetic polypeptide
EVQLLESGGGLVQPGGSLRLSCAASGFTFDDYAMHWVRQAPGKGLEWVSGISWNSGSIGYADSVKGRFTISRDNSKNTLYLQMNSLRAEDTAVYYCAKDIVAAGHYYYGMDVWGQGTTVTVSSGGGGSGGGGSGGGGSGGGGSDIQMTQSPSSLSASVGDRVTITCQASQDISNYLNWYQQKPGKAPKLLIYDASNLETGVPSRFSGSGSGTDFTLTISSLQPEDFATYYCQQSYSTPLTFGGGTKVEIK

SEQ ID NO: 178 - protein, 13 aa, Artificial Sequence
  Description of Artificial Sequence: Synthetic peptide
SYIDTSSSHLYYA

SEQ ID NO: 179 - protein, 16 aa, Artificial Sequence
  Description of Artificial Sequence: Synthetic peptide
CARDEAAAGYYGMDVW

SEQ ID NO: 180 - protein, 11 aa, Artificial Sequence
  Description of Artificial Sequence: Synthetic peptide
QAGQDISNYLN

SEQ ID NO: 181 - protein, 11 aa, Artificial Sequence [sequence omitted]

SEQ ID NO: 182 - protein, 248 aa, Artificial Sequence
  Description of Artificial Sequence: Synthetic polypeptide
EVQLLESGGGLVQPGGSLRLSCAASGFTFDDYAMHWVRQAPGKGLEWVSYIDTSSSHLYYADSVKGRFTISRDNSKNTLYLQMNSLRAEDTAVYYCARDEAAAGYYGMDVWGQGTTVTVSSGGGGSGGGGSGGGGSGGGGSDIQMTQSPSSLSASVGDRVTITCQAGQDISNYLNWYQQKPGKAPKLLIYDASNLETGVPSRFSGSGSGTDFTLTISSLQPEDFATYYCQQTYSTPITFGQGTKLEIK

SEQ ID NO: 183 - protein, 9 aa, Artificial Sequence
  Description of Artificial Sequence: Synthetic peptide
FTFSNAWMS

SEQ ID NO: 184 - protein, 13 aa, Artificial Sequence
  Description of Artificial Sequence: Synthetic peptide
STIVGNGGATYYA

SEQ ID NO: 185 - protein, 15 aa, Artificial Sequence
  Description of Artificial Sequence: Synthetic peptide
CARDNPLRWQGMDVW

SEQ ID NO: 186 - protein, 11 aa, Artificial Sequence
  Description of Artificial Sequence: Synthetic peptide
RASQDISNYLN

SEQ ID NO: 187 - protein, 11 aa, Artificial Sequence [sequence omitted]

SEQ ID NO: 188 - protein, 247 aa, Artificial Sequence
  Description of Artificial Sequence: Synthetic polypeptide
EVQLLESGGGLVQPGGSLRLSCAASGFTFSNAWMSWVRQAPGKGLEWVSTIVGNGGATYYADSVKGRFTISRDNSKNTLYLQMNSLRAEDTAVYYCARDNPLRWQGMDVWGQGTLVTVSSGGGGSGGGGSGGGGSGGGGSDIQMTQSPSSLSASVGDRVTITCRASQDISNYLNWYQQKPGKAPKLLIYAASSLQSGVPSRFSGSGSGTDFTLTISSLQPEDFATYYCQQSYSIPPTFGPGTKVDIK

SEQ ID NO: 189 - protein, 9 aa, Artificial Sequence
  Description of Artificial Sequence: Synthetic peptide
FTFSSYQMS

SEQ ID NO: 190 - protein, 13 aa, Artificial Sequence
  Description of Artificial Sequence: Synthetic peptide
SYISSSSTYTNYA

SEQ ID NO: 191 - protein, 17 aa, Artificial Sequence
  Description of Artificial Sequence: Synthetic peptide
CARANSSSWYDWYFDLW

SEQ ID NO: 192 - protein, 249 aa, Artificial Sequence
  Description of Artificial Sequence: Synthetic polypeptide
EVQLLESGGGLVQPGGSLRLSCAASGFTFSSYQMSWVRQAPGKGLEWVSYISSSSTYTNYADSVKGRFTISRDNSKNTLYLQMNSLRAEDTAVYYCARANSSSWYDWYFDLWGQGTLVTVSSGGGGSGGGGSGGGGSGGGGSDIQMTQSPSSLSASVGDRVTITCRASQSISSYLNWYQQKPGKAPKLLIYAASSLQSGVPSRFSGSGSGTDFTLTISSLQPEDFATYYCQQSYSTPLTFGGGTKVEIK

SEQ ID NO: 193 - protein, 9 aa, Artificial Sequence
  Description of Artificial Sequence: Synthetic peptide
FTFSSYAMH

SEQ ID NO: 194 - protein, 13 aa, Artificial Sequence
  Description of Artificial Sequence: Synthetic peptide
SGISGSGGSAYYA

SEQ ID NO: 195 - protein, 18 aa, Artificial Sequence
  Description of Artificial Sequence: Synthetic peptide
CATSQAPVDYYYYGMDVW

SEQ ID NO: 196 - protein, 11 aa, Artificial Sequence
  Description of Artificial Sequence: Synthetic peptide
RASQSISSWLA

SEQ ID NO: 197 - protein, 7 aa, Artificial Sequence
  Description of Artificial Sequence: Synthetic peptide
AASNLQR

SEQ ID NO: 198 - protein, 11 aa, Artificial Sequence [sequence omitted]

SEQ ID NO: 199 - protein, 250 aa, Artificial Sequence
  Description of Artificial Sequence: Synthetic polypeptide
EVQLLESGGGLVQPGGSLRLSCAASGFTFSSYAMHWVRQAPGKGLEWVSGISGSGGSAYYADSVKGRFTISRDNSKNTLYLQMNSLRAEDTAVYYCATSQAPVDYYYYGMDVWGQGTTVTVSSGGGGSGGGGSGGGGSGGGGSDIQMTQSPSSLSASVGDRVTITCRASQSISSWLAWYQQKPGKAPKLLIYAASNLQRGVPSRFSGSGSGTDFTLTISSLQPEDFATYYCQQSYSIPITFGQGTKVEIK

SEQ ID NO: 200 - protein, 13 aa, Artificial Sequence
  Description of Artificial Sequence: Synthetic peptide
SYISGSSSYTNYA

SEQ ID NO: 201 - protein, 17 aa, Artificial Sequence
  Description of Artificial Sequence: Synthetic peptide
CARVGSSGWYDWYFDLW

SEQ ID NO: 202 - protein, 249 aa, Artificial Sequence
  Description of Artificial Sequence: Synthetic polypeptide
EVQLVESGGGLVKPGGSLRLSCAASGFTFSSYWMSWVRQAPGKGLEWVSYISGSSSYTNYAAPVKGRFTISRDDSKNTLYLQMNSLKTEDTAVYYCARVGSSGWYDWYFDLWGRGTLVTVSSGGGGSGGGGSGGGGSGGGGSDIQMTQSPSSLSASVGDRVTITCRASQSISSYLNWYQQKPGKAPKLLIYAASSLQSGVPSRFSGSGSGTDFTLTISSLQPEDFATYYCQQSYSTPLTFGQGTKVEIK

SEQ ID NO: 203 - protein, 245 aa, Artificial Sequence
  Description of Artificial Sequence: Synthetic polypeptide
QVQLVQSGAEVKKPGASVKVSCKASGYTLTTWYMYWVRQAPGQGLEWMGWINPNRGATNYAQKFQGRVTMTRDTSTSTVYMELSSLRSEDTAVYYCAKGDLWGAMDVWGQGTTVTVSSGGGGSGGGGSGGGGSGGGGSDIQMTQSPSSLSASVGDRVTITCRASDNIGSWLAWYQQKPGKAPKLLIYAASSLQSGVPSRFSGSGSGTDFTLTISSLQPEDFATYYCQQGYSTPPTFGQGTKVEIK

SEQ ID NO: 204 - protein, 9 aa, Artificial Sequence
  Description of Artificial Sequence: Synthetic peptide
YTFTGYYIH

SEQ ID NO: 205 - protein, 13 aa, Artificial Sequence
  Description of Artificial Sequence: Synthetic peptide
GWMNPNSGNTGYA

SEQ ID NO: 206 - protein, 24 aa, Artificial Sequence
  Description of Artificial Sequence: Synthetic peptide
CARDPGFLGYCSGGSCYDGWFDPW

SEQ ID NO: 207 - protein, 11 aa, Artificial Sequence
  Description of Artificial Sequence: Synthetic peptide
RASQSISSYLH

SEQ ID NO: 208 - protein, 11 aa, Artificial Sequence [sequence omitted]

SEQ ID NO: 209 - protein, 256 aa, Artificial Sequence
  Description of Artificial Sequence: Synthetic polypeptide
QVQLVQSGAEVKKPGASVKVSCKASGYTFTGYYIHWVRQAPGQGLEWMGWMNPNSGNTGYAQKFQGRVTMTRDTSTSTVYMELSSLRSEDTAVYYCARDPGFLGYCSGGSCYDGWFDPWGQGTLVTVSSGGGGSGGGGSGGGGSGGGGSDIQMTQSPSSLSASVGDRVTITCRASQSISSYLHWYQQKPGKAPKLLIYAASSLQSGVPSRFSGSGSGTDFTLTISSLQPEDFATYYCQQSYTAPYTFGQGTKLEIK

SEQ ID NO: 210 - protein, 9 aa, Artificial Sequence
  Description of Artificial Sequence: Synthetic peptide
YTFTDYFLH

SEQ ID NO: 211 - protein, 13 aa, Artificial Sequence
  Description of Artificial Sequence: Synthetic peptide
GWMNPTSGNTGYA

SEQ ID NO: 212 - protein, 13 aa, Artificial Sequence
  Description of Artificial Sequence: Synthetic peptide
CAREGEGSGFDYW

SEQ ID NO: 213 - protein, 11 aa, Artificial Sequence
  Description of Artificial Sequence: Synthetic peptide
RASQGINSWLA

SEQ ID NO: 214 - protein, 245 aa, Artificial Sequence
  Description of Artificial Sequence: Synthetic polypeptide
QVQLVQSGAEVKKPGASVKVSCKASGYTFTDYFLHWVRQAPGQGLEWMGWMNPTSGNTGYAQKFQGRVTMTRDTSTSTVYMELSSLRSEDTAVYYCAREGEGSGFDYWGQGTLVTVSSGGGGSGGGGSGGGGSGGGGSDIQMTQSPSSLSASVGDRVTITCRASQGINSWLAWYQQKPGKAPKLLIYDASNLETGVPSRFSGSGSGTDFTLTISSLQPEDFATYYCQQSYSTPLTFGGGTKVEIK

SEQ ID NO: 215 - protein, 9 aa, Artificial Sequence
  Description of Artificial Sequence: Synthetic peptide
YTFTSYYMH

SEQ ID NO: 216 - protein, 13 aa, Artificial Sequence
  Description of Artificial Sequence: Synthetic peptide
AWMNPNSGNTGYA

SEQ ID NO: 217 - protein, 15 aa, Artificial Sequence
  Description of Artificial Sequence: Synthetic peptide
CARDYDFWSGSLGYW

SEQ ID NO: 218 - protein, 11 aa, Artificial Sequence
  Description of Artificial Sequence: Synthetic peptide
RASQGISNYLA

SEQ ID NO: 219 - protein, 247 aa, Artificial Sequence
  Description of Artificial Sequence: Synthetic polypeptide
QVQLVQSGAEVKKPGASVKVSCKASGYTFTSYYMHWVRQAPGQGLEWMAWMNPNSGNTGYAQKFQGRVTMTRDTSTSTVYMELSSLRSEDTAVYYCARDYDFWSGSLGYWGQGTLVTVSSGGGGSGGGGSGGGGSGGGGSDIQMTQSPSSLSASVGDRVTITCRASQGISNYLAWYQQKPGKAPKLLIYAASSLQSGVPSRFSGSGSGTDFTLTISSLQPEDFATYYCQQSYSTPWTFGQGTKVEIK

SEQ ID NO: 220 - protein, 20 aa, Artificial Sequence
  Description of Artificial Sequence: Synthetic peptide
CARDTGYSYGRYYYYGMDVW

SEQ ID NO: 221 - protein, 11 aa, Artificial Sequence
  Description of Artificial Sequence: Synthetic peptide
RASQSIGRWLA

SEQ ID NO: 222 - protein, 7 aa, Artificial Sequence
  Description of Artificial Sequence: Synthetic peptide
DASNLQS

SEQ ID NO: 223 - protein, 252 aa, Artificial Sequence
  Description of Artificial Sequence: Synthetic polypeptide
QVQLVQSGAEVKKPGASVKVSCKASGYTFTSYYMHWVRQAPGQGLEWMGIINPSGGSTSYAQKFQGRVTMTRDTSTSTVYMELSSLRSEDTAVYYCARDTGYSYGRYYYYGMDVWGQGTLVTVSSGGGGSGGGGSGGGGSGGGGSDIQMTQSPSSLSASVGDRVTITCRASQSIGRWLAWYQQKPGKAPKLLIYDASNLQSGVPSRFSGSGSGTDFTLTISSLQPEDFATYYCQQSYSIPITFGQGTKVEIK

SEQ ID NO: 224 - protein, 9 aa, Artificial Sequence
  Description of Artificial Sequence: Synthetic peptide
YTLTDYYMH

SEQ ID NO: 225 - protein, 16 aa, Artificial Sequence
  Description of Artificial Sequence: Synthetic peptide
CAREEYSSSSGYFDYW

SEQ ID NO: 226 - protein, 11 aa, Artificial Sequence
  Description of Artificial Sequence: Synthetic peptide
RASQGISSWLA

SEQ ID NO: 227 - protein, 248 aa, Artificial Sequence
  Description of Artificial Sequence: Synthetic polypeptide
QVQLVQSGAEVKKPGASVKVSCKASGYTLTDYYMHWVRQAPGQGLEWMGIINPSGGSTSYAQKFQGRVTMTRDTSTSTVYMELSSLRSEDTAVYYCAREEYSSSSGYFDYWGQGTLVTVSSGGGGSGGGGSGGGGSGGGGSDIQMTQSPSSLSASVGDRVTITCRASQGISSWLAWYQQKPGKAPKLLIYAASSLQSGVPSRFSGSGSGTDFTLTISSLQPEDFATYYCQQSYSTPLTFGQGTKVEIK

SEQ ID NO: 228 - protein, 9 aa, Artificial Sequence
  Description of Artificial Sequence: Synthetic peptide
YTFTSYGIS

SEQ ID NO: 229 - protein, 13 aa, Artificial Sequence
  Description of Artificial Sequence: Synthetic peptide
GWMHPKSGDTGLT

SEQ ID NO: 230 - protein, 15 aa, Artificial Sequence [sequence omitted]

SEQ ID NO: 231 - protein, 11 aa, Artificial Sequence [sequence omitted]

SEQ ID NO: 232 - protein, 247 aa, Artificial Sequence
  Description of Artificial Sequence: Synthetic polypeptide
QVQLVQSGAEVKKPGASVKVSCKASGYTFTSYGISWVRQAPGQGLEWMGWMHPKSGDTGLTQKFQGRVTMTRDTSTSTVYMELSSLRSEDTAVYYCARDTPYYYYGMDVWGQGTTVTVSSGGGGSGGGGSGGGGSGGGGSDIQMTQSPSSLSASVGDRVTITCRASQSISSWLAWYQQKPGKAPKLLIYAASSLQSGVPSRFSGSGSGTDFTLTISSLQPEDFATYYCQQSYSVPITFGQGTKVEIK

SEQ ID NO: 233 - protein, 9 aa, Artificial Sequence
  Description of Artificial Sequence: Synthetic peptide
FTFGDYAMS

SEQ ID NO: 234 - protein, 13 aa, Artificial Sequence
  Description of Artificial Sequence: Synthetic peptide
SYISGDIGYTNYA

SEQ ID NO: 235 - protein, 16 aa, Artificial Sequence
  Description of Artificial Sequence: Synthetic peptide
CARDVAATGNWYFDLW

SEQ ID NO: 236 - protein, 248 aa, Artificial Sequence
  Description of Artificial Sequence: Synthetic polypeptide
EVQLVESGGGLVKPGGSLRLSCAASGFTFGDYAMSWVRQAPGKGLEWVSYISGDIGYTNYAAPVKGRFTISRDDSKNTLYLQMNSLKTEDTAVYYCARDVAATGNWYFDLWGRGTLVTVSSGGGGSGGGGSGGGGSGGGGSDIQMTQSPSSLSASVGDRVTITCRASQSISSYLNWYQQKPGKAPKLLIYAASSLQSGVPSRFSGSGSGTDFTLTISSLQPEDFATYYCQQSYSTPLTFGGGTKVEIK

SEQ ID NO: 237 - protein, 9 aa, Artificial Sequence
  Description of Artificial Sequence: Synthetic peptide
FSFSSYTMN

SEQ ID NO: 238 - protein, 13 aa, Artificial Sequence
  Description of Artificial Sequence: Synthetic peptide
SFITSSSRTIYYA

SEQ ID NO: 239 - protein, 18 aa, Artificial Sequence
  Description of Artificial Sequence: Synthetic peptide
CARDRRGDYGDSWYFDLW

SEQ ID NO: 240 - protein, 11 aa, Artificial Sequence
  Description of Artificial Sequence: Synthetic peptide
RASQSVRNYLA

SEQ ID NO: 241 - protein, 7 aa, Artificial Sequence
  Description of Artificial Sequence: Synthetic peptide
GASTRAT

SEQ ID NO: 242 - protein, 11 aa, Artificial Sequence [sequence omitted]

SEQ ID NO: 243 - protein, 250 aa, Artificial Sequence
  Description of Artificial Sequence: Synthetic polypeptide
EVQLLESGGGLVQPGGSLRLSCAASGFSFSSYTMNWVRQAPGKGLEWVSFITSSSRTIYYADSVKGRFTISRDNSKNTLYLQMNSLRAEDTAVYYCARDRRGDYGDSWYFDLWGRGTLVTVSSGGGGSGGGGSGGGGSGGGGSEIVMTQSPATLSVSPGERATLSCRASQSVRNYLAWYQQKPGQAPRLLIYGASTRATGIPARFSGSGSGTEFTLTISSLQSEDFAVYYCQQYGSSPLTFGGGTKVEIK

SEQ ID NO: 244 - protein, 9 aa, Artificial Sequence
  Description of Artificial Sequence: Synthetic peptide
YTFTGHYMH

SEQ ID NO: 245 - protein, 252 aa, Artificial Sequence
  Description of Artificial Sequence: Synthetic polypeptide
QVQLVQSGAEVKKPGASVKVSCKASGYTFTGHYMHWVRQAPGQGLEWMGIINPSGGSTSYAQKFQGRVTMTRDTSTSTVYMELSSLRSEDTAVYYCARDTGYSYGRYYYYGMDVWGQGTTVTVSSGGGGSGGGGSGGGGSGGGGSDIQMTQSPSSLSASVGDRVTITCRASQSIGRWLAWYQQKPGKAPKLLIYDASNLQSGVPSRFSGSGSGTDFTLTISSLQPEDFATYYCQQSYSIPITFGGGTKVEIK

SEQ ID NO: 246 - protein, 9 aa, Artificial Sequence
  Description of Artificial Sequence: Synthetic peptide
YTFSKHFVH

SEQ ID NO: 247 - protein, 13 aa, Artificial Sequence
  Description of Artificial Sequence: Synthetic peptide
GWMNPNSGNSGYA

SEQ ID NO: 248 - protein, 16 aa, Artificial Sequence
  Description of Artificial Sequence: Synthetic peptide
CARGEGGYYYYGMDVW

SEQ ID NO: 249 - protein, 248 aa, Artificial Sequence
  Description of Artificial Sequence: Synthetic polypeptide
QVQLVQSGAEVKKPGASVKVSCKASGYTFSKHFVHWVRQAPGQGLEWMGWMNPNSGNSGYAQKFQGRVTMTRDTSTSTVYMELSSLRSEDTAVYYCARGEGGYYYYGMDVWGQGTLVTVSSGGGGSGGGGSGGGGSGGGGSDIQMTQSPSSLSASVGDRVTITCRASQSISSWLAWYQQKPGKAPKLLIYAASTLQSGVPSRFSGSGSGTDFTLTISSLQPEDFATYYCQQSYSTPWTFGQGTKVEIK

SEQ ID NO: 250 - protein, 9 aa, Artificial Sequence
  Description of Artificial Sequence: Synthetic peptide
FTFGSYSMS

SEQ ID NO: 251 - protein, 12 aa, Artificial Sequence
  Description of Artificial Sequence: Synthetic peptide
SAIGTGGGTYYA

SEQ ID NO: 252 - protein, 16 aa, Artificial Sequence
  Description of Artificial Sequence: Synthetic peptide
CAKGTPYYYYYGMDVW

SEQ ID NO: 253 - protein, 11 aa, Artificial Sequence
  Description of Artificial Sequence: Synthetic peptide
RASQPLSNWLA

SEQ ID NO: 254 - protein, 11 aa, Artificial Sequence [sequence omitted]

SEQ ID NO: 255 - protein, 247 aa, Artificial Sequence
  Description of Artificial Sequence: Synthetic polypeptide
EVQLLESGGGLVQPGGSLRLSCAASGFTFGSYSMSWVRQAPGKGLEWVSAIGTGGGTYYADSVKGRFTISRDNSKNTLYLQMNSLRAEDTAVYYCAKGTPYYYYYGMDVWGQGTMVTVSSGGGGSGGGGSGGGGSGGGGSDIQMTQSPSSLSASVGDRVTITCRASQPLSNWLAWYQQKPGKAPKLLIYAASSLQSGVPSRFSGSGSGTDFTLTISSLQPEDFATYYCQQAISFPLTFGGGTKVEIK

SEQ ID NO: 256 - protein, 20 aa, Artificial Sequence
  Description of Artificial Sequence: Synthetic peptide
CARDLGYYDSSGYFGAFDIW

SEQ ID NO: 257 - protein, 11 aa, Artificial Sequence
  Description of Artificial Sequence: Synthetic peptide
QSSEDISSSLN

SEQ ID NO: 258 - protein, 7 aa, Artificial Sequence
  Description of Artificial Sequence: Synthetic peptide
AASSLQI

SEQ ID NO: 259 - protein, 11 aa, Artificial Sequence [sequence omitted]

SEQ ID NO: 260 - protein, 252 aa, Artificial Sequence
  Description of Artificial Sequence: Synthetic polypeptide
QVQLVQSGAEVKKPGASVKVSCKASGYTFTSYYMHWVRQAPGQGLEWMGWMNPNSGNTGYAQKFQGRVTMTRDTSTSTVYMELSSLRSEDTAVYYCARDLGYYDSSGYFGAFDIWGQGTTVTVSSGGGGSGGGGSGGGGSGGGGSDIQMTQSPSSLSASVGDRVTITCQSSEDISSSLNWYQQKPGKAPKLLIYAASSLQIGVPSRFSGSGSGTDFTLTISSLQPEDFATYYCQQTYSTPYTFGQGTKVEIK

SEQ ID NO: 261 - protein, 13 aa, Artificial Sequence
  Description of Artificial Sequence: Synthetic peptide
GIINPRGGSTIFA

SEQ ID NO: 262 - protein, 17 aa, Artificial Sequence
  Description of Artificial Sequence: Synthetic peptide
CARGTRSSGWYGWFDPW

SEQ ID NO: 263 - protein, 11 aa, Artificial Sequence
  Description of Artificial Sequence: Synthetic peptide
RASQGIGNWLA

SEQ ID NO: 264 - protein, 7 aa, Artificial Sequence
  Description of Artificial Sequence: Synthetic peptide
AASNLET

SEQ ID NO: 265 - protein, 11 aa, Artificial Sequence
  Description of Artificial Sequence: Synthetic peptide
CQQIHSYPLTF

SEQ ID NO: 266 - protein, 249 aa, Artificial Sequence
  Description of Artificial Sequence: Synthetic polypeptide
QVQLVQSGAEVKKPGASVKVSCKASGYTFTSYGISWVRQAPGQGLEWMGIINPRGGSTIFAQKFQGRVTMTRDTSTSTVYMELSSLRSEDTAVYYCARGTRSSGWYGWFDPWGQGTLVTVSSGGGGSGGGGSGGGGSGGGGSDIQMTQSPSSLSASVGDRVTITCRASQGIGNWLAWYQQKPGKAPKLLIYAASNLETGVPSRFSGSGSGTDFTLTISSLQPEDFATYYCQQIHSYPLTFGGGTKVEIK

SEQ ID NO: 267 - protein, 9 aa, Artificial Sequence
  Description of Artificial Sequence: Synthetic peptide
FTFDDYGMS

SEQ ID NO: 268 - protein, 13 aa, Artificial Sequence
  Description of Artificial Sequence: Synthetic peptide
SYISSSSSYIYYA

SEQ ID NO: 269 - protein, 16 aa, Artificial Sequence
  Description of Artificial Sequence: Synthetic peptide
CAREIAAAGFYGMDVW

SEQ ID NO: 270 - protein, 248 aa, Artificial Sequence
  Description of Artificial Sequence: Synthetic polypeptide
EVQLLESGGGLVQPGGSLRLSCAASGFTFDDYGMSWVRQAPGKGLEWVSYISSSSSYIYYADSVKGRFTISRDNSKNTLYLQMNSLRAEDTAVYYCAREIAAAGFYGMDVWGQGTTVTVSSGGGGSGGGGSGGGGSGGGGSDIQMTQSPSSLSASVGDRVTITCRASQSISSYLNWYQQKPGKAPKLLIYAASSLQSGVPSRFSGSGSGTDFTLTISSLQPEDFATYYCQQSYSTPLTFGGGTKVEIK

SEQ ID NO: 271 - protein, 9 aa, Artificial Sequence
  Description of Artificial Sequence: Synthetic peptide
GTLSRYGVS

SEQ ID NO: 272 - protein, 13 aa, Artificial Sequence
  Description of Artificial Sequence: Synthetic peptide
GGIIPIFGTTNYA

SEQ ID NO: 273 - protein, 21 aa, Artificial Sequence
  Description of Artificial Sequence: Synthetic peptide
CARDRVYYDSSGYPTWYFDLW

SEQ ID NO: 274 - protein, 12 aa, Artificial Sequence
  Description of Artificial Sequence: Synthetic peptide
RASQSVSSSYLA

SEQ ID NO: 275 - protein, 11 aa, Artificial Sequence [sequence omitted]

SEQ ID NO: 276 - protein, 254 aa, Artificial Sequence
  Description of Artificial Sequence: Synthetic polypeptide
QVQLVQSGAEVKKPGSSVKVSCKASGGTLSRYGVSWVRQAPGQGLEWMGGIIPIFGTTNYAQKFQGRVTITADESTSTAYMELSSLRSEDTAVYYCARDRVYYDSSGYPTWYFDLWGRGTLVTVSSGGGGSGGGGSGGGGSGGGGSEIVMTQSPATLSVSPGERATLSCRASQSVSSSYLAWYQQKPGQAPRLLIYGASTRATGIPARFSGSGSGTEFTLTISSLQSEDFAVYYCQQYGSSPITFGQGTKVEIK

SEQ ID NO: 277 - protein, 9 aa, Artificial Sequence
  Description of Artificial Sequence: Synthetic peptide
FTFDDFAMH

SEQ ID NO: 278 - protein, 13 aa, Artificial Sequence
  Description of Artificial Sequence: Synthetic peptide
SGISGNGDSRYYA

SEQ ID NO: 279 - protein, 16 aa, Artificial Sequence
  Description of Artificial Sequence: Synthetic peptide
CARDASYGGNYGMDVW

SEQ ID NO: 280 - protein, 11 aa, Artificial Sequence
  Description of Artificial Sequence: Synthetic peptide
QASQDIRNYLN

SEQ ID NO: 281 - protein, 248 aa, Artificial Sequence
  Description of Artificial Sequence: Synthetic polypeptide
EVQLLESGGGLVQPGGSLRLSCAASGFTFDDFAMHWVRQAPGKGLEWVSGISGNGDSRYYADSVKGRFTISRDNSKNTLYLQMNSLRAEDTAVYYCARDASYGGNYGMDVWGQGTTVTVSSGGGGSGGGGSGGGGSGGGGSDIQMTQSPSSLSASVGDRVTITCQASQDIRNYLNWYQQKPGKAPKLLIYKASTLESGVPSRFSGSGSGTDFTLTISSLQPEDFATYYCQQANSFPLTFGPGTKVDIK

SEQ ID NO: 282 - protein, 15 aa, Artificial Sequence
  Description of Artificial Sequence: Synthetic peptide
CAREWLVPYYGMDVW

SEQ ID NO: 283 - protein, 11 aa, Artificial Sequence
  Description of Artificial Sequence: Synthetic peptide
RASQSISRWLA

SEQ ID NO: 284 - protein, 7 aa, Artificial Sequence
  Description of Artificial Sequence: Synthetic peptide
GASNLQS

SEQ ID NO: 285 - protein, 246 aa, Artificial Sequence
  Description of Artificial Sequence: Synthetic polypeptide
EVQLVESGGGLVKPGGSLRLSCAASGFTFSSYWMSWVRQAPGKGLEWVSAIGTGGGTYYAAPVKGRFTISRDDSKNTLYLQMNSLKTEDTAVYYCAREWLVPYYGMDVWGQGTTVTVSSGGGGSGGGGSGGGGSGGGGSDIQMTQSPSSLSASVGDRVTITCRASQSISRWLAWYQQKPGKAPKLLIYGASNLQSGVPSRFSGSGSGTDFTLTISSLQPEDFATYYCQQSYSTPWTFGQGTKVEIK

SEQ ID NO: 286 - protein, 9 aa, Artificial Sequence
  Description of Artificial Sequence: Synthetic peptide
FSVSSNYMS

SEQ ID NO: 287 - protein, 13 aa, Artificial Sequence
  Description of Artificial Sequence: Synthetic peptide
AGISYDGSSKPYA

SEQ ID NO: 288 - protein, 15 aa, Artificial Sequence
  Description of Artificial Sequence: Synthetic peptide
CARSRGIAARPLQHW

SEQ ID NO: 289 - protein, 17 aa, Artificial Sequence
  Description of Artificial Sequence: Synthetic peptide
KSSQSVLYSSNNKNYLA

SEQ ID NO: 290 - protein, 7 aa, Artificial Sequence
  Description of Artificial Sequence: Synthetic peptide
WASTRQS

SEQ ID NO: 291 - protein, 11 aa, Artificial Sequence
  Description of Artificial Sequence: Synthetic peptide
CHQYYGHPPTF

SEQ ID NO: 292 - protein, 253 aa, Artificial Sequence
  Description of Artificial Sequence: Synthetic polypeptide
EVQLLESGGGLVQPGGSLRLSCAASGFSVSSNYMSWVRQAPGKGLEWVAGISYDGSSKPYADSVKGRFTISRDNSKNTLYLQMNSLRAEDTAVYYCARSRGIAARPLQHWGQGTLVTVSSGGGGSGGGGSGGGGSGGGGSDIVMTQSPDSLAVSLGERATINCKSSQSVLYSSNNKNYLAWYQQKPGQPPKLLIYWASTRQSGVPDRFSGSGSGTDFTLTISSLQAEDVAVYYCHQYYGHPPTFGGGTKVEIK

SEQ ID NO: 293 - protein, 7 aa, Artificial Sequence
  Description of Artificial Sequence: Synthetic peptide
QASTRQS

SEQ ID NO: 294 - protein, 253 aa, Artificial Sequence
  Description of Artificial Sequence: Synthetic polypeptide
EVQLLESGGGLVQPGGSLRLSCAASGFSVSSNYMSWVRQAPGKGLEWVAGISYDGSSKPYADSVKGRFTISRDNSKNTLYLQMNSLRAEDTAVYYCARSRGIAARPLQHWGQGTLVTVSSGGGGSGGGGSGGGGSGGGGSDIVMTQSPDSLAVSLGERATINCKSSQSVLYSSNNKNYLAWYQQKPGQPPKLLIYQASTRQSGVPDRFSGSGSGTDFTLTISSLQAEDVAVYYCHQYYGHPPTFGGGTKVEIK

SEQ ID NO: 295 - protein, 9 aa, Artificial Sequence
  Description of Artificial Sequence: Synthetic peptide
FSFSDYGMH

SEQ ID NO: 296 - protein, 16 aa, Artificial Sequence
  Description of Artificial Sequence: Synthetic peptide
CARDGGWQPAAILDYW

SEQ ID NO: 297 - protein, 248 aa, Artificial Sequence
  Description of Artificial Sequence: Synthetic polypeptide
EVQLLESGGGLVQPGGSLRLSCAASGFSFSDYGMHWVRQAPGKGLEWVSAISGSGGSTYYADSVKGRFTISRDNSKNTLYLQMNSLRAEDTAVYYCARDGGWQPAAILDYWGQGTLVTVSSGGGGSGGGGSGGGGSGGGGSDIQMTQSPSSLSASVGDRVTITCRASQGISNNLNWYQQKPGKAPKLLIYDASNLETGVPSRFSGSGSGTDFTLTISSLQPEDFATYYCQQSYSTPLTFGGGTKVEIK

SEQ ID NO: 298 - protein, 9 aa, Artificial Sequence
  Description of Artificial Sequence: Synthetic peptide
FTFSDHGMH

SEQ ID NO: 299 - protein, 12 aa, Artificial Sequence
  Description of Artificial Sequence: Synthetic peptide
SVIYGGESTYYA

SEQ ID NO: 300 - protein, 16 aa, Artificial Sequence
  Description of Artificial Sequence: Synthetic peptide
CARDPAVAGGGIFDYW

SEQ ID NO: 301 - protein, 11 aa, Artificial Sequence
  Description of Artificial Sequence: Synthetic peptide
CQQSYSTCYTF

SEQ ID NO: 302 - protein, 247 aa, Artificial Sequence
  Description of Artificial Sequence: Synthetic polypeptide
EVQLLESGGGLVQPGGSLRLSCAASGFTFSDHGMHWVRQAPGKGLEWVSVIYGGESTYYADSVKGRFTISRDNSKNTLYLQMNSLRAEDTAVYYCARDPAVAGGGIFDYWGQGTLVTVSSGGGGSGGGGSGGGGSGGGGSDIQMTQSPSSLSASVGDRVTITCRASQGISNYLAWYQQKPGKAPKLLIYDASNLETGVPSRFSGSGSGTDFTLTISSLQPEDFATYYCQQSYSTCYTFGQGTKLEIK

SEQ ID NO: 303 - protein, 9 aa, Artificial Sequence
  Description of Artificial Sequence: Synthetic peptide
DTFTGYYIH

SEQ ID NO: 304 - protein, 13 aa, Artificial Sequence
  Description of Artificial Sequence: Synthetic peptide
GWINPNSGGTNYA

SEQ ID NO: 305 - protein, 17 aa, Artificial Sequence
  Description of Artificial Sequence: Synthetic peptide
CARSGLWLGSYYGMDVW

SEQ ID NO: 306 - protein, 11 aa, Artificial Sequence
  Description of Artificial Sequence: Synthetic peptide
RASQTISIWLA

SEQ ID NO: 307 - protein, 7 aa, Artificial Sequence
  Description of Artificial Sequence: Synthetic peptide
DASTLQS

SEQ ID NO: 308 - protein, 11 aa, Artificial Sequence [sequence omitted]

SEQ ID NO: 309 - protein, 249 aa, Artificial Sequence
  Description of Artificial Sequence: Synthetic polypeptide
QVQLVQSGAEVKKPGASVKVSCKASGDTFTGYYIHWVRQAPGQGLEWMGWINPNSGGTNYAQKFQGRVTMTRDTSTSTVYMELSSLRSEDTAVYYCARSGLWLGSYYGMDVWGQGTLVTVSSGGGGSGGGGSGGGGSGGGGSDIQMTQSPSSLSASVGDRVTITCRASQTISIWLAWYQQKPGKAPKLLIYDASTLQSGVPSRFSGSGSGTDFTLTISSLQPEDFATYYCQQYSSYPLTFGQGTKVEIK

SEQ ID NO: 310 - protein, 9 aa, Artificial Sequence
  Description of Artificial Sequence: Synthetic peptide
YTFTSYDIN

SEQ ID NO: 311 - protein, 13 aa, Artificial Sequence
  Description of Artificial Sequence: Synthetic peptide
GWINPNSGTTGYA

SEQ ID NO: 312 - protein, 14 aa, Artificial Sequence
  Description of Artificial Sequence: Synthetic peptide
CARSPYYYYGMDVW

SEQ ID NO: 313 - protein, 11 aa, Artificial Sequence
  Description of Artificial Sequence: Synthetic peptide
RASHFISRWVA

SEQ ID NO: 314 - protein, 10 aa, Artificial Sequence
  Description of Artificial Sequence: Synthetic peptide
CQQSYSGISF

SEQ ID NO: 315 - protein, 245 aa, Artificial Sequence
  Description of Artificial Sequence: Synthetic polypeptide
QVQLVQSGAEVKKPGASVKVSCKASGYTFTSYDINWVRQAPGQGLEWMGWINPNSGTTGYAQKFQGRVTMTRDTSTSTVYMELSSLRSEDTAVYYCARSPYYYYGMDVWGQGTTVTVSSGGGGSGGGGSGGGGSGGGGSDIQMTQSPSSLSASVGDRVTITCRASHFISRWVAWYQQKPGKAPKLLIYAASTLQSGVPSRFSGSGSGTDFTLTISSLQPEDFATYYCQQSYSGISFGPGTKVDIK

SEQ ID NO: 316 - protein, 9 aa, Artificial Sequence
  Description of Artificial Sequence: Synthetic peptide
FTFNNYGMN

SEQ ID NO: 317 - protein, 13 aa, Artificial Sequence
  Description of Artificial Sequence: Synthetic peptide
SRINSDGSSTSYA

SEQ ID NO: 318 - protein, 14 aa, Artificial Sequence [sequence omitted]

SEQ ID NO: 319 - protein, 12 aa, Artificial Sequence
  Description of Artificial Sequence: Synthetic peptide
RASQSVSGSYLA

SEQ ID NO: 320 - protein, 7 aa, Artificial Sequence
  Description of Artificial Sequence: Synthetic peptide
ATSSRAS

SEQ ID NO: 321 - protein, 10 aa, Artificial Sequence
  Description of Artificial Sequence: Synthetic peptide
CQQYYSGLTF

SEQ ID NO: 322 - protein, 246 aa, Artificial Sequence
  Description of Artificial Sequence: Synthetic polypeptide
EVQLLESGGGLVQPGGSLRLSCAASGFTFNNYGMNWVRQAPGKGLEWVSRINSDGSSTSYADSVKGRFTISRDNSKNTLYLQMNSLRAEDTAVYYCARGAYYYYYMDVWGQGTLVTVSSGGGGSGGGGSGGGGSGGGGSEIVMTQSPATLSVSPGERATLSCRASQSVSGSYLAWYQQKPGQAPRLLIYATSSRASGIPARFSGSGSGTEFTLTISSLQSEDFAVYYCQQYYSGLTFGQGTKVEIK

SEQ ID NO: 323 - protein, 9 aa, Artificial Sequence
  Description of Artificial Sequence: Synthetic peptide
FTFSNSDMN

SEQ ID NO: 324 - protein, 13 aa, Artificial Sequence
  Description of Artificial Sequence: Synthetic peptide
AHIWNDGSQKYYA

SEQ ID NO: 325 - protein, 17 aa, Artificial Sequence
  Description of Artificial Sequence: Synthetic peptide
CARDRTDPGYSSAMDVW

SEQ ID NO: 326 - protein, 11 aa, Artificial Sequence
  Description of Artificial Sequence: Synthetic peptide
RASQDIRNYLG

SEQ ID NO: 327 - protein, 7 aa, Artificial Sequence
  Description of Artificial Sequence: Synthetic peptide
DASSLET

SEQ ID NO: 328 - protein, 11 aa, Artificial Sequence
  Description of Artificial Sequence: Synthetic peptide
CQQATSLPLTF

SEQ ID NO: 329 - protein, 249 aa, Artificial Sequence
  Description of Artificial Sequence: Synthetic polypeptide
EVQLLESGGGLVQPGGSLRLSCAASGFTFSNSDMNWVRQAPGKGLEWVAHIWNDGSQKYYADSVKGRFTISRDNSKNTLYLQMNSLRAEDTAVYYCARDRTDPGYSSAMDVWGQGTTVTVSSGGGGSGGGGSGGGGSGGGGSDIQMTQSPSSLSASVGDRVTITCRASQDIRNYLGWYQQKPGKAPKLLIYDASSLETGVPSRFSGSGSGTDFTLTISSLQPEDFATYYCQQATSLPLTFGGGTKVEIK

SEQ ID NO: 330 - protein, 15 aa, Artificial Sequence
  Description of Artificial Sequence: Synthetic peptide
CAKDSDYSNLLWDYW

SEQ ID NO: 331 - protein, 11 aa, Artificial Sequence
  Description of Artificial Sequence: Synthetic peptide
RASQDITNDLG

SEQ ID NO: 332 - protein, 7 aa, Artificial Sequence
  Description of Artificial Sequence: Synthetic peptide
QASSLES

SEQ ID NO: 333 - protein, 11 aa, Artificial Sequence [sequence omitted]

SEQ ID NO: 334 - protein, 247 aa, Artificial Sequence
  Description of Artificial Sequence: Synthetic polypeptide
QVQLVQSGAEVKKPGASVKVSCKASGYTFTSYDINWVRQAPGQGLEWMGWMNPNSGNTGYAQKFQGRVTMTRDTSTSTVYMELSSLRSEDTAVYYCAKDSDYSNLLWDYWGQGTLVTVSSGGGGSGGGGSGGGGSGGGGSDIQMTQSPSSLSASVGDRVTITCRASQDITNDLGWYQQKPGKAPKLLIYQASSLESGVPSRFSGSGSGTDFTLTISSLQPEDFATYYCQQSYTIPLTFGQGTKVEIK

SEQ ID NO: 335 - protein, 13 aa, Artificial Sequence
  Description of Artificial Sequence: Synthetic peptide
AVVSYDGTNKYYA

SEQ ID NO: 336 - protein, 16 aa, Artificial Sequence
  Description of Artificial Sequence: Synthetic peptide
CAKDICSSTSCYFDLW

SEQ ID NO: 337 - protein, 11 aa, Artificial Sequence
  Description of Artificial Sequence: Synthetic peptide
RASQNINNYVN

SEQ ID NO: 338 - protein, 11 aa, Artificial Sequence [sequence omitted]

SEQ ID NO: 339 - protein, 248 aa, Artificial Sequence
  Description of Artificial Sequence: Synthetic polypeptide
EVQLLESGGGLVQPGGSLRLSCAASGFTFGDYAMSWVRQAPGKGLEWVAVVSYDGTNKYYADSVKGRFTISRDNSKNTLYLQMNSLRAEDTAVYYCAKDICSSTSCYFDLWGRGTLVTVSSGGGGSGGGGSGGGGSGGGGSDIQMTQSPSSLSASVGDRVTITCRASQNINNYVNWYQQKPGKAPKLLIYDASNLETGVPSRFSGSGSGTDFTLTISSLQPEDFATYYCQQANSFPPTFGQGTRLEIK

SEQ ID NO: 340 - protein, 13 aa, Artificial Sequence
  Description of Artificial Sequence: Synthetic peptide
GIIDPSGGSTSYA

SEQ ID NO: 341 - protein, 17 aa, Artificial Sequence
  Description of Artificial Sequence: Synthetic peptide
CAREEWSSGGVGYFDYW

SEQ ID NO: 342 - protein, 11 aa, Artificial Sequence
  Description of Artificial Sequence: Synthetic peptide
RASQGISSYLA

SEQ ID NO: 343 - protein, 7 aa, Artificial Sequence
  Description of Artificial Sequence: Synthetic peptide
ATSSLQT

SEQ ID NO: 344 - protein, 11 aa, Artificial Sequence [sequence omitted]

SEQ ID NO: 345 - protein, 249 aa, Artificial Sequence
  Description of Artificial Sequence: Synthetic polypeptide
QVQLVQSGAEVKKPGASVKVSCKASGYTFTSYYMHWVRQAPGQGLEWMGIIDPSGGSTSYAQKFQGRVTMTRDTSTSTVYMELSSLRSEDTAVYYCAREEWSSGGVGYFDYWGQGTLVTVSSGGGGSGGGGSGGGGSGGGGSDIQMTQSPSSLSASVGDRVTITCRASQGISSYLAWYQQKPGKAPKLLIYATSSLQTGVPSRFSGSGSGTDFTLTISSLQPEDFATYYCQQTYSIPITFGQGTRLEIK

SEQ ID NO: 346 - protein, 13 aa, Artificial Sequence
  Description of Artificial Sequence: Synthetic peptide
SAISGGGEDTYYA

SEQ ID NO: 347 - protein, 7 aa, Artificial Sequence
  Description of Artificial Sequence: Synthetic peptide
KASSLES

SEQ ID NO: 348 - protein, 11 aa, Artificial Sequence
  Description of Artificial Sequence: Synthetic peptide
CQQANSYPVTF

SEQ ID NO: 349 - protein, 248 aa, Artificial Sequence
  Description of Artificial Sequence: Synthetic polypeptide
EVQLLESGGGLVQPGGSLRLSCAASGFTFDDYAMHWVRQAPGKGLEWVSAISGGGEDTYYADSVKGRFTISRDNSKNTLYLQMNSLRAEDTAVYYCARDASYGGNYGMDVWGQGTTVTVSSGGGGSGGGGSGGGGSGGGGSDIQMTQSPSSLSASVGDRVTITCQASQDIRNYLNWYQQKPGKAPKLLIYKASSLESGVPSRFSGSGSGTDFTLTISSLQPEDFATYYCQQANSYPVTFGGGTKVEIK

SEQ ID NO: 350 - protein, 19 aa, Artificial Sequence
  Description of Artificial Sequence: Synthetic peptide
CARDSVAGTGGRYYGMDVW

SEQ ID NO: 351 - protein, 11 aa, Artificial Sequence
  Description of Artificial Sequence: Synthetic peptide
RASQGISNYFA

SEQ ID NO: 352 - protein, 7 aa, Artificial Sequence
  Description of Artificial Sequence: Synthetic peptide
AASSLQG

SEQ ID NO: 353 - protein, 11 aa, Artificial Sequence [sequence omitted]

SEQ ID NO: 354 - protein, 251 aa, Artificial Sequence
  Description of Artificial Sequence: Synthetic polypeptide
QVQLVQSGAEVKKPGASVKVSCKASGYTFTSYYMHWVRQAPGQGLEWMGIINPSGGSTSYAQKFQGRVTMTRDTSTSTVYMELSSLRSEDTAVYYCARDSVAGTGGRYYGMDVWGQGTLVTVSSGGGGSGGGGSGGGGSGGGGSDIQMTQSPSSLSASVGDRVTITCRASQGISNYFAWYQQKPGKAPKLLIYAASSLQGGVPSRFSGSGSGTDFTLTISSLQPEDFATYYCQQSYSLPYTFGQGTKLEIK

SEQ ID NO: 355 - protein, 13 aa, Artificial Sequence
  Description of Artificial Sequence: Synthetic peptide
GIINPSGGNTKYA

SEQ ID NO: 356 - protein, 13 aa, Artificial Sequence
  Description of Artificial Sequence: Synthetic peptide
CTTADYYYYMDVW

SEQ ID NO: 357 - protein, 10 aa, Artificial Sequence
  Description of Artificial Sequence: Synthetic peptide
CQQYYSNADF

SEQ ID NO: 358 - protein, 244 aa, Artificial Sequence
  Description of Artificial Sequence: Synthetic polypeptide
QVQLVQSGAEVKKPGASVKVSCKASGYTFTGYYMHWVRQAPGQGLEWMGIINPSGGNTKYAQKFQGRVTMTRDTSTSTVYMELSSLRSEDTAVYYCTTADYYYYMDVWGKGTTVTVSSGGGGSGGGGSGGGGSGGGGSDIQMTQSPSSLSASVGDRVTITCRASQGISNYLAWYQQKPGKAPKLLIYAASSLQSGVPSRFSGSGSGTDFTLTISSLQPEDFATYYCQQYYSNADFGQGTKVEIK

SEQ ID NO: 359 - protein, 9 aa, Artificial Sequence
  Description of Artificial Sequence: Synthetic peptide
FTFSDFWMH

SEQ ID NO: 360 - protein, 14 aa, Artificial Sequence [sequence omitted]

SEQ ID NO: 361 - protein, 11 aa, Artificial Sequence
  Description of Artificial Sequence: Synthetic peptide
RASQSVSRSLA

SEQ ID NO: 362 - protein, 5 aa, Artificial Sequence
  Description of Artificial Sequence: Synthetic peptide
SSLQS

SEQ ID NO: 363 - protein, 9 aa, Artificial Sequence
  Description of Artificial Sequence: Synthetic peptide
QQYKSYPVT

SEQ ID NO: 364 - protein, 246 aa, Artificial Sequence
  Description of Artificial Sequence: Synthetic polypeptide
EVQLLESGGGLVQPGGSLRLSCAASGFTFSDFWMHWVRQAPGKGLEWISYISGDSGYTNYADSVKGRFTISRDNSKNTLYLQMNSLRAEDTAVYYCARDRPYYYYMDVWGKGTTVTVSSGGGGSGGGGSGGGGSGGGGSDIQMTQSPSSLSASVGDRVTITCRASQSVSRSLAWYQQKPGKAPKLLIYAASSLQSGVPSRFSGSGSGTDFTLTISSLQPEDFATYYCQQYKSYPVTFGQGTKVEIK

SEQ ID NO: 365 - protein, 9 aa, Artificial Sequence
  Description of Artificial Sequence: Synthetic peptide
FTFDDYTMH

SEQ ID NO: 366 - protein, 13 aa, Artificial Sequence
  Description of Artificial Sequence: Synthetic peptide
SDISGSGGSTYYA

SEQ ID NO: 367 - protein, 17 aa, Artificial Sequence
  Description of Artificial Sequence: Synthetic peptide
CAKDVVVAGTPLHFDYW

SEQ ID NO: 368 - protein, 5 aa, Artificial Sequence
  Description of Artificial Sequence: Synthetic peptide
SYLQS

SEQ ID NO: 369 - protein, 9 aa, Artificial Sequence
  Description of Artificial Sequence: Synthetic peptide
QQAHNYPIT

SEQ ID NO: 370 - protein, 249 aa, Artificial Sequence
  Description of Artificial Sequence: Synthetic polypeptide
EVQLLESGGGLVQPGGSLRLSCAASGFTFDDYTMHWVRQAPGKGLEWVSDISGSGGSTYYADSVKGRFTISRDNSKNTLYLQMNSLRAEDTAVYYCAKDVVVAGTPLHFDYWGQGTLVTVSSGGGGSGGGGSGGGGSGGGGSDIQMTQSPSSLSASVGDRVTITCQASQDISNYLNWYQQKPGKAPKLLIYAASYLQSGVPSRFSGSGSGTDFTLTISSLQPEDFATYYCQQAHNYPITFGQGTRLEIK

SEQ ID NO: 371 - protein, 13 aa, Artificial Sequence
  Description of Artificial Sequence: Synthetic peptide
ASISSTSAYIDYA

SEQ ID NO: 372 - protein, 14 aa, Artificial Sequence
  Description of Artificial Sequence: Synthetic peptide
CAREVVGATTFDYW

SEQ ID NO: 373 - protein, 11 aa, Artificial Sequence
  Description of Artificial Sequence: Synthetic peptide
RASQSISTWLA

SEQ ID NO: 374 - protein, 9 aa, Artificial Sequence
  Description of Artificial Sequence: Synthetic peptide
QQANAFPPT

SEQ ID NO: 375 - protein, 246 aa, Artificial Sequence
  Description of Artificial Sequence: Synthetic polypeptide
EVQLLESGGGLVQPGGSLRLSCAASEFTFSNAWMSWVRQAPGKGLEWVASISSTSAYIDYADSVKGRFTISRDNSKNTLYLQMNSLRAEDTAVYYCAREVVGATTFDYWGQGTLVTVSSGGGGSGGGGSGGGGSGGGGSDIQMTQSPSSLSASVGDRVTITCRASQSISTWLAWYQQKPGKAPKLLIYAASSLQSGVPSRFSGSGSGTDFTLTISSLQPEDFATYYCQQANAFPPTFGQGTRLEIK

SEQ ID NO: 376 - protein, 13 aa, Artificial Sequence
  Description of Artificial Sequence: Synthetic peptide
GWMEPHTGNTRYA

SEQ ID NO: 377 - protein, 12 aa, Artificial Sequence
  Description of Artificial Sequence: Synthetic peptide
CAKGGFSWFDPW

SEQ ID NO: 378 - protein, 5 aa, Artificial Sequence
  Description of Artificial Sequence: Synthetic peptide
STRES

SEQ ID NO: 379 - protein, 9 aa, Artificial Sequence
  Description of Artificial Sequence: Synthetic peptide
QQYYSTPPT

SEQ ID NO: 380 - protein, 250 aa, Artificial Sequence
  Description of Artificial Sequence: Synthetic polypeptide
QVQLVQSGAEVKKPGSSVKVSCKASGGTFSSYAISWVRQAPGQGLEWMGWMEPHTGNTRYAQKFQGRVTITADESTSTAYMELSSLRSEDTAVYYCAKGGFSWFDPWGQGTLVTVSSGGGGSGGGGSGGGGSGGGGSDIVMTQSPDSLAVSLGERATINCKSSQSVLYSSNNKNYLAWYQQKPGQPPKLLIYWASTRESGVPDRFSGSGSGTDFTLTISSLQAEDVAVYYCQQYYSTPPTFGQGTRLEIK

SEQ ID NO: 381 - protein, 13 aa, Artificial Sequence
  Description of Artificial Sequence: Synthetic peptide
ASITSSSAFIDYA

SEQ ID NO: 382 - protein, 15 aa, Artificial Sequence
  Description of Artificial Sequence: Synthetic peptide
CARERVDWNSYFDLW

SEQ ID NO: 383 - protein, 12 aa, Artificial Sequence
  Description of Artificial Sequence: Synthetic peptide
RASQGISNSYLA

SEQ ID NO: 384 - protein, 5 aa, Artificial Sequence
  Description of Artificial Sequence: Synthetic peptide
STRAT

SEQ ID NO: 385 - protein, 9 aa, Artificial Sequence
  Description of Artificial Sequence: Synthetic peptide
QQYYTYPPT

SEQ ID NO: 386 - protein, 248 aa, Artificial Sequence
  Description of Artificial Sequence: Synthetic polypeptide
EVQLLESGGGLVKPGGSLRLSCAASGFTFDDYAMHWVRQAPGKGLEWVASITSSSAFIDYAASVKGRFTISRDDSKNTLYLQMNSLKTEDTAVYYCARERVDWNSYFDLWGRGTLVTVSSGGGGSGGGGSGGGGSGGGGSEIVMTQSPATLSVSPGERATLSCRASQGISNSYLAWYQQKPGQAPRLLIYGASTRATGIPARFSGSGSGTEFTLTISSLQSEDFAVYYCQQYYTYPPTFGPGTKVDIK

SEQ ID NO: 387 - protein, 9 aa, Artificial Sequence
  Description of Artificial Sequence: Synthetic peptide
FAFSSHWMH

SEQ ID NO: 388 - protein, 13 aa, Artificial Sequence
  Description of Artificial Sequence: Synthetic peptide
AGTSGSGESRDYA

SEQ ID NO: 389 - protein, 14 aa, Artificial Sequence
  Description of Artificial Sequence: Synthetic peptide
CARETYYYYYMDVW

SEQ ID NO: 390 - protein, 5 aa, Artificial Sequence
  Description of Artificial Sequence: Synthetic peptide
ANLEG

SEQ ID NO: 391 - protein, 9 aa, Artificial Sequence
  Description of Artificial Sequence: Synthetic peptide
QQSDIFPPT

SEQ ID NO: 392 - protein, 246 aa, Artificial Sequence
  Description of Artificial Sequence: Synthetic polypeptide
EVQLLESGGGLVKPGGSLRLSCAASGFAFSSHWMHWVRQAPGKGLEWVAGTSGSGESRDYADFVKGRFTISRDDSKNTLYLQMNSLKTEDTAVYYCARETYYYYYMDVWGKGTTVTVSSGGGGSGGGGSGGGGSGGGGSDIQMTQSPSSLSASVGDRVTITCRASQGISNYLAWYQQKPGKAPKLLIYDAANLEGGVPSRFSGSGSGTDFTLTISSLQPEDFATYYCQQSDIFPPTFGQGTKVEIK

SEQ ID NO: 393 - protein, 9 aa, Artificial Sequence
  Description of Artificial Sequence: Synthetic peptide
YTFTRHWIH

SEQ ID NO: 394 - protein, 13 aa, Artificial Sequence
  Description of Artificial Sequence: Synthetic peptide
GWINVKTGGAGYA

SEQ ID NO: 395 - protein, 14 aa, Artificial Sequence
  Description of Artificial Sequence: Synthetic peptide
CARESSGWYGTDVW

SEQ ID NO: 396 - protein, 11 aa, Artificial Sequence
  Description of Artificial Sequence: Synthetic peptide
RASQSISNYLA

SEQ ID NO: 397 - protein, 9 aa, Artificial Sequence
  Description of Artificial Sequence: Synthetic peptide
QQSNSFPLT

SEQ ID NO: 398 - protein, 246 aa, Artificial Sequence
  Description of Artificial Sequence: Synthetic polypeptide
QVQLVQSGAEVKKPGASVKVSCKASGYTFTRHWIHWVRQAPGQGLEWMGWINVKTGGAGYAQKFQGRVTMTRDTSTSTVYMELSSLRSEDTAVYYCARESSGWYGTDVWGQGTTVTVSSGGGGSGGGGSGGGGSGGGGSDIQMTQSPSSLSASVGDRATITCRASQSISNYLAWYQQKPGKAPKLLIYAASSLQSGVPSRFSGSGSGTDFTLTISSLQPEDFATYYCQQSNSFPLTFGGGTKVEIK

SEQ ID NO: 399 - protein, 13 aa, Artificial Sequence
  Description of Artificial Sequence: Synthetic peptide
AAISYDGKYKDYE

SEQ ID NO: 400 - protein, 15 aa, Artificial Sequence
  Description of Artificial Sequence: Synthetic peptide
CARENKQWLASFDYW

SEQ ID NO: 401 - protein, 11 aa, Artificial Sequence
  Description of Artificial Sequence: Synthetic peptide
QASQDISNFVN

SEQ ID NO: 402 - protein, 4 aa, Artificial Sequence
  Description of Artificial Sequence: Synthetic peptide
NLRS

SEQ ID NO: 403 - protein, 9 aa, Artificial Sequence
  Description of Artificial Sequence: Synthetic peptide
QQANSFPVT

SEQ ID NO: 404 - protein, 246 aa, Artificial Sequence
  Description of Artificial Sequence: Synthetic polypeptide
EVQLLESGGGLVQPGGSLRLSCAASGFTFSSYWMHWVRQAPGKGLEWVAAISYDGKYKDYEDSVKGRFTISRDNSKNTLYLQMNSLRAEDTAVYYCARENKQWLASFDYWGQGTLVTVSSGGGGSGGGGSGGGGSGGGGSDIQMTQSPSSLSASVGDRVTITCQASQDISNFVNWYQQKPGKAPKLLIYAANLRSGVPSRFSGSGSGTDFTLTISSLQPEDFATYYCQQANSFPVTFGPGTKVDIK

SEQ ID NO: 405 - protein, 120 aa, Artificial Sequence
  Description of Artificial Sequence: Synthetic polypeptide
EVQLLESGGGLVQPGGSLRLSCAASGFTFSSYGMHWVRQAPGKGLEWVAVISDDGSDKYYADSVKGRFTISRDNSKNTLYLQMNSLRAEDTAVYYCTTSKYYYYYGMDVWGQGTTVTVSS

SEQ ID NO: 406 - protein, 107 aa, Artificial Sequence
  Description of Artificial Sequence: Synthetic polypeptide
DIQMTQSPSSLSASVGDRVTITCQASQDISKSLNWYQQKPGKAPKLLIYAASSLQSGVPSRFSGSGSGTDFTLTISSLQPEDFATYYCQQGYSTPLTFGGGTKVEIK

SEQ ID NO: 407 - protein, 119 aa, Artificial Sequence
  Description of Artificial Sequence: Synthetic polypeptide
QVQLVQSGAEVKKPGASVKVSCKASGYPFIGYYLHWVRQAPGQGLEWMGIINPSGGSTSYAQKFQGRVTMTRDTSTSTVYMELSSLRSEDTAVYYCAREGRLSYGMDAWGQGTLVTVSS

SEQ ID NO: 408 - protein, 107 aa, Artificial Sequence
  Description of Artificial Sequence: Synthetic polypeptide
DIQMTQSPSSLSASVGDRVTITCRASQSISSYLAWYQQKPGKAPKLLIYGASTLESGVPSRFSGSGSGTDFTLTISSLQPEDFATYYCQQTWGPPFTFGQGTKLEIK

SEQ ID NO: 409 - protein, 119 aa, Artificial Sequence
  Description of Artificial Sequence: Synthetic polypeptide
QVQLVQSGAEVKKPGASVKVSCKASGYPFIGQYLHWVRQAPGQGLEWMGIINPSGGSTSYAQKFQGRVTMTRDTSTSTVYMELSSLRSEDTAVYYCAREGRLSYGMDAWGQGTLVTVSS

SEQ ID NO: 410 - protein, 121 aa, Artificial Sequence
  Description of Artificial Sequence: Synthetic polypeptide
QVQLVQSGAEVKKPGASVKVSCKASGGTFSSYAISWVRQAPGQGLEWMGSINPSGDTTSYAQKFQGRVTMTRDTSTSTVYMELSSLRSEDTAVYYCAKDKAQWLVGYFDYWGQGTLVTVSS

SEQ ID NO: 411 - protein, 107 aa, Artificial Sequence
  Description of Artificial Sequence: Synthetic polypeptide
DIQMTQSPSSLSASVGDRVTITCQASQDISNSLNWYQQKPGKAPKLLIYAASSLQSGVPSRFSGSGSGTDFTLTISSLQPEDFATYYCQQSYSSVITFGQGTKVEIK

SEQ ID NO: 412 - protein, 118 aa, Artificial Sequence
  Description of Artificial Sequence: Synthetic polypeptide
EVQLLESGGGLVQPGGSLRLSCAASGFTFSSYWMHWVRQAPGKGLEWVSSISPGGSNIDYADSVKGRFTISRDNSKNTLYLQMNSLRAEDTAVYYCAREVQLSHYDYWGQGTLVTVSS

SEQ ID NO: 413 - protein, 107 aa, Artificial Sequence
  Description of Artificial Sequence: Synthetic polypeptide
DIQMTQSPSSLSASVGDRVTITCRASQGISNSLAWYQQKPGKAPKLLIYGASSLQSGVPSRFSGSGSGTDFTLTISSLQPEDFATYYCQQANSFPFTFGQGTKVEIK

SEQ ID NO: 414 - protein, 121 aa, Artificial Sequence
  Description of Artificial Sequence: Synthetic polypeptide
EVQLLESGGGLVQPGGSLRLSCAASGFTFNNYAFHWVRQAPGKGLEWVSRINSYGTSTTYADSVKGRFTISRDNSKNTLYLQMNSLRAEDTAVYYCAREGPVAGYWYFDLWGQGTLVTVSS

SEQ ID NO: 415 - protein, 107 aa, Artificial Sequence
  Description of Artificial Sequence: Synthetic polypeptide
DIQMTQSPSSLSASVGDRVTITCRASQIIGTNLAWYQQKPGKAPKLLIYGASSLQSGVPSRFSGSGSGTDFTLTISSLQPEDFATYYCQQSYRLPFTFGQGTKVEIK

SEQ ID NO: 416 - protein, 9 aa, Artificial Sequence
  Description of Artificial Sequence: Synthetic peptide
FTFSDYQMS

SEQ ID NO: 417 - protein, 14 aa, Artificial Sequence
  Description of Artificial Sequence: Synthetic peptide
AIISHADGGFKDYA

SEQ ID NO: 418 - protein, 18 aa, Artificial Sequence
  Description of Artificial Sequence: Synthetic peptide
CAKPYSSGWSAVYYFDYW

SEQ ID NO: 419 - protein, 11 aa, Artificial Sequence
  Description of Artificial Sequence: Synthetic peptide
RASRGITNDLG

SEQ ID NO: 420 - protein, 5 aa, Artificial Sequence
  Description of Artificial Sequence: Synthetic peptide
STLQS

SEQ ID NO: 421 - protein, 9 aa, Artificial Sequence
  Description of Artificial Sequence: Synthetic peptide
QQAYSFPWT

SEQ ID NO: 422 - protein, 124 aa, Artificial Sequence
  Description of Artificial Sequence: Synthetic polypeptide
EVQLLESGGGLVQPGGSLRLSCAASGFTFSDYQMSWVRQAPGKGLEWVAIISHADGGFKDYADSVKGRFTISRDNSKNTLYLQMNSLRAEDTAVYYCAKPYSSGWSAVYYFDYWGQGTLVTVSS

SEQ ID NO: 423 - protein, 107 aa, Artificial Sequence
  Description of Artificial Sequence: Synthetic polypeptide
DIQMTQSPSSLSASVGDRVTITCRASRGITNDLGWYQQKPGKAPKLLIYAASTLQSGVPSRFSGSGSGTDFTLTISSLQPEDFATYYCQQAYSFPWTFGQGTKVEIK

SEQ ID NO: 424 - protein, 121 aa, Artificial Sequence
  Description of Artificial Sequence: Synthetic polypeptide
QVQLVQSGAEVKKPGASVKVSCKASGYTFTGYHIHWVRQAPGQGLEWMGIINPSGGSTIYAQKFQGRVTMTRDTSTSTVYMELSSLRSEDTAVYYCAKDWSSWYLGPFDYWGQGTLVTVSS

SEQ ID NO: 425 - protein, 107 aa, Artificial Sequence
  Description of Artificial Sequence: Synthetic polypeptide
DIQMTQSPSSLSASVGDRVTITCRASQNISSSLNWYQQKPGKAPKLLIYAASSLQSGVPSRFSGSGSGTDFTLTISSLQPEDFATYYCQQSYTTPYTFGQGTKVEIK

SEQ ID NO: 426 - protein, 13 aa, Artificial Sequence
  Description of Artificial Sequence: Synthetic peptide
GIINHSGGSTSYA

SEQ ID NO: 427 - protein, 15 aa, Artificial Sequence
  Description of Artificial Sequence: Synthetic peptide
CARPYSGWYFAFDIW

SEQ ID NO: 428 - protein, 11 aa, Artificial Sequence
  Description of Artificial Sequence: Synthetic peptide
RASQSISSSLN

SEQ ID NO: 429 - protein, 9 aa, Artificial Sequence
  Description of Artificial Sequence: Synthetic peptide
QQSYSTPLT

SEQ ID NO: 430 - protein, 120 aa, Artificial Sequence
  Description of Artificial Sequence: Synthetic polypeptide
QVQLVQSGAEVKKPGASVKVSCKASGYTFTSYYMHWVRQAPGQGLEWMGIINHSGGSTSYAQKFQGRVTMTRDTSTSTVYMELSSLRSEDTAVYYCARPYSGWYFAFDIWGQGTLVTVSS

SEQ ID NO: 431 - protein, 107 aa, Artificial Sequence
  Description of Artificial Sequence: Synthetic polypeptide
DIQMTQSPSSLSASVGDRVTITCRASQSISSSLNWYQQKPGKAPKLLIYAASTLQSGVPSRFSGSGSGTDFTLTISSLQPEDFATYYCQQSYSTPLTFGQGTKVEIK

SEQ ID NO: 432 - protein, 121 aa, Artificial Sequence
  Description of Artificial Sequence: Synthetic polypeptide
EVQLLESGGGLVQPGGSLRLSCAASGFMFGDYAMHWVRQAPGKGLEWVSAISGSGGSTYYADSVKGRFTISRDNSKNTLYLQMNSLRAEDTAVYYCAKDLVVAGIWYFDLWGRGTLVTVSS

SEQ ID NO: 433 - protein, 107 aa, Artificial Sequence
  Description of Artificial Sequence: Synthetic polypeptide
DIQMTQSPSSLSASVGDRVTITCRASQGISNNLNWYQQKPGKAPKLLIYDASSLESGVPSRFSGSGSGTDFTLTISSLQPEDFATYYCQQTHSFPSTFGQGTKLEIK

SEQ ID NO: 434 - protein, 123 aa, Artificial Sequence
  Description of Artificial Sequence: Synthetic polypeptide
EVQLLESGGGLVQPGGSLRLSCAASGFTFSDYYMNWVRQAPGKGLEWVSVIGESGGSTYYADSVKGRFTISRDNSKNTLYLQMNSLRAEDTAVYYCAADPVSRWPKHGGGDYWGQGTLVTVSS

SEQ ID NO: 435 - protein, 107 aa, Artificial Sequence
  Description of Artificial Sequence: Synthetic polypeptide
DIQMTQSPSSLSASVGDRVTITCRASQGISSSLAWYQQKPGKAPKLLIYAASTLQSGVPSRFSGSGSGTDFTLTISSLQPEDFATYYCQQSYSTPWTFGQGTKVEIK

SEQ ID NO: 436 - protein, 118 aa, Artificial Sequence
  Description of Artificial Sequence: Synthetic polypeptide
QVQLVQSGAEVKKPGASVKVSCKASGYTLTTWYMYWVRQAPGQGLEWMGWINPNRGATNYAQKFQGRVTMTRDTSTSTVYMELSSLRSEDTAVYYCAKGDLWGAMDVWGQGTLVTVSS

SEQ ID NO: 437 - protein, 107 aa, Artificial Sequence
  Description of Artificial Sequence: Synthetic polypeptide
DIQMTQSPSSLSASVGDRVTITCRASDNIGSWLAWYQQKPGKAPKLLIYAASSLQSGVPSRFSGSGSGTDFTLTISSLQPEDFATYYCQQGYSTPPTFGQGTKVEIK

SEQ ID NO: 438 - protein, 127 aa, Artificial Sequence
  Description of Artificial Sequence: Synthetic polypeptide
QVQLVQSGAEVKKPGASVKVSCKASGYTFTTYYMHWVRQAPGQGLEWMGGFDPEDGETIYAQKFQGRVTMTRDTSTSTVYMELSSLRSEDTAVYYCARHAVAGAVGAGYYYYGMDVWGQGTMVTVSS

SEQ ID NO: 439 - protein, 107 aa, Artificial Sequence
  Description of Artificial Sequence: Synthetic polypeptide
DIQMTQSPSSLSASVGDRVTITCRASESISNWLAWYQQKPGKAPKLLIYAASTLQSGVPSRFSGSGSGTDFTLTISSLQPEDFATYYCQQSYSVPFTFGPGTKVDIK

SEQ ID NO: 440 - protein, 13 aa, Artificial Sequence
  Description of Artificial Sequence: Synthetic peptide
GGIIPIVDGVKYA

SEQ ID NO: 441 - protein, 17 aa, Artificial Sequence
  Description of Artificial Sequence: Synthetic peptide
CAKGQFTGNYYYGMDYW

SEQ ID NO: 442 - protein, 5 aa, Artificial Sequence
  Description of Artificial Sequence: Synthetic peptide
SKLEA

SEQ ID NO: 443 - protein, 9 aa, Artificial Sequence
  Description of Artificial Sequence: Synthetic peptide
QQSSEIPYS

SEQ ID NO: 444 - protein, 122 aa, Artificial Sequence
  Description of Artificial Sequence: Synthetic polypeptide
QVQLVQSGAEVKKPGSSVKVSCKASGYTFTNYYMHWVRQAPGQGLEWMGGIIPIVDGVKYAQKFQGRVTITADESTSTAYMELSSLRSEDTAVYYCAKGQFTGNYYYGMDYWGQGTLVTVSS

SEQ ID NO: 445 - protein, 107 aa, Artificial Sequence
  Description of Artificial Sequence: Synthetic polypeptide
DIQMTQSPSSLSASVGDRVTITCQANQDISNYLNWYQQKPGKAPKLLIYRASKLEAGVPSRFSGSGSGTDFTLTISSLQPEDFATYYCQQSSEIPYSFGQGTKVEIK

SEQ ID NO: 446 - protein, 119 aa, Artificial Sequence
  Description of Artificial Sequence: Synthetic polypeptide
QVQLVQSGAEVKKPGASVKVSCKASGYTFTGYYMHWVRQAPGQGLEWMGWIGPNSGDTNYAQKFQGRVTMTRDTSTSTVYMELSSLRSEDTAVYYCARDLDHNWYFDLWGRGTLVTVSS

SEQ ID NO: 447 - protein, 112 aa, Artificial Sequence
  Description of Artificial Sequence: Synthetic polypeptide
DIVMTQSPLSLPVTPGEPASISCRSSQSLLHSNGYNYLDWYLQKPGQSPQLLIYSSSNRAPGVPDRFSGSGSGTDFTLKISRVEAEDVGVYYCMQALHIPLTFGGGTKVEIK

SEQ ID NO: 448 - protein, 121 aa, Artificial Sequence
  Description of Artificial Sequence: Synthetic polypeptide
EVQLLESGGGLVQPGGSLRLSCAASGFTFDDYAMHWVRQAPGKGLEWVSYIDASGTTIYYADSVKGRFTISRDNSKNTLYLQMNSLRAEDTAVYYCAKDQAAAGYWYFDLWGRGTLVTVSS

SEQ ID NO: 449 - protein, 107 aa, Artificial Sequence
  Description of Artificial Sequence: Synthetic polypeptide
DIQMTQSPSSLSASVGDRVTITCQASQDISNYLNWYQQKPGKAPKLLIYKASTLESGVPSRFSGSGSGTDFTLTISSLQPEDFATYYCQQSYSTPITFGQGTRLEIK

SEQ ID NO: 450 - protein, 120 aa, Artificial Sequence
  Description of Artificial Sequence: Synthetic polypeptide
QVQLVQSGAEVKKPGSSVKVSCKASGYTFTDYHIHWVRQAPGQGLEWMGGIVPRSGSTTYAQKFQGRVTITADESTSTAYMELSSLRSEDTAVYYCAKDESSGWYYFDYWGQGTLVTVSS

SEQ ID NO: 451 - protein, 112 aa, Artificial Sequence
  Description of Artificial Sequence: Synthetic polypeptide
DIVMTQSPLSLPVTPGEPASISCRSSQSLLHSNGYNYLDWYLQKPGQSPQLLIYSAYNRASGVPDRFSGSGSGTDFTLKISRVEAEDVGVYYCMQALQTPLTFGQGTKVEIK

SEQ ID NO: 452 - protein, 122 aa, Artificial Sequence
  Description of Artificial Sequence: Synthetic polypeptide
QVQLVQSGAEVKKPGSSVKVSCKASGYTFTNYYMHWVRQAPGQGLEWMGGIIPIVDRVKYAQKFQGRVTITADESTSTAYMELSSLRSEDTAVYYCAKGRYTVNYYYGMDVWGQGTTVTVSS

SEQ ID NO: 453 - protein, 107 aa, Artificial Sequence
  Description of Artificial Sequence: Synthetic polypeptide
DIQMTQSPSSLSASVGDRVTITCQANQDISNYLNWYQQKPGKAPKLLIYRASKLEAGVPSRFSGSGSGTDFTLTISSLQPEDFATYYCQQSSEIPYSFGQGTKLEIK

SEQ ID NO: 454 - protein, 121 aa, Artificial Sequence
  Description of Artificial Sequence: Synthetic polypeptide
EVQLLESGGGLVQPGGSLRLSCAASGFTFEDYAMHWVRQAPGKGLEWVSYLNSDGGSTSYADSVKGRFTISRDNSKNTLYLQMNSLRAEDTAVYYCAKDYCTNGVCAFDYWGQGTLVTVSS

SEQ ID NO: 455 - protein, 107 aa, Artificial Sequence
  Description of Artificial Sequence: Synthetic polypeptide
DIQMTQSPSSLSASVGDRVTITCRASQSISTYLNWYQQKPGKAPKLLIYDASNLETGVPSRFSGSGSGTDFTLTISSLQPEDFATYYCQQSYTIPITFGQGTRLEIK

SEQ ID NO: 456 - protein, 121 aa, Artificial Sequence
  Description of Artificial Sequence: Synthetic polypeptide
EVQLLESGGGLVQPGGSLRLSCAASGFTFSDSAMHWVRQAPGKGLEWVSAISGSGSTIYYADSVKGRFTISRDNSKNTLYLQMNSLRAEDTAVYYCVSDIAVAGHWYFDLWGRGTLVTVSS

SEQ ID NO: 457 - protein, 107 aa, Artificial Sequence
  Description of Artificial Sequence: Synthetic polypeptide
DIQMTQSPSSLSASVGDRVTITCRASQSISTFLNWYQQKPGKAPKLLIYAASRLEGGVPSRFSGSGSGTDFTLTISSLQPEDFATYYCQQANSFPLTFGPGTKVDIK

SEQ ID NO: 458 - protein, 122 aa, Artificial Sequence
  Description of Artificial Sequence: Synthetic polypeptide
EVQLVESGGGLVKPGGSLRLSCAASGFTFSSYWMSWVRQAPGKGLEWVSYISGDSGYTNYAAPVKGRFTISRDDSKNTLYLQMNSLKTEDTAVYYCARANSSGWYDWYFDLWGRGTLVTVSS

SEQ ID NO: 459 - protein, 107 aa, Artificial Sequence [sequence omitted]

SEQ ID NO: 460 - protein, 123 aa, Artificial Sequence
  Description of Artificial Sequence: Synthetic polypeptide
EVQLLESGGGLVQPGGSLRLSCAASGFTFDDYAMHWVRQAPGKGLEWVSGISWNSGSIGYADSVKGRFTISRDNSKNTLYLQMNSLRAEDTAVYYCAKDIVAAGHYYYGMDVWGQGTTVTVSS

SEQ ID NO: 461 - protein, 107 aa, Artificial Sequence
  Description of Artificial Sequence: Synthetic polypeptide
DIQMTQSPSSLSASVGDRVTITCQASQDISNYLNWYQQKPGKAPKLLIYDASNLETGVPSRFSGSGSGTDFTLTISSLQPEDFATYYCQQSYSTPLTFGGGTKVEIK

SEQ ID NO: 462 - protein, 121 aa, Artificial Sequence
  Description of Artificial Sequence: Synthetic polypeptide
EVQLLESGGGLVQPGGSLRLSCAASGFTFDDYAMHWVRQAPGKGLEWVSYIDTSSSHLYYADSVKGRFTISRDNSKNTLYLQMNSLRAEDTAVYYCARDEAAAGYYGMDVWGQGTTVTVSS

SEQ ID NO: 463 - protein, 107 aa, Artificial Sequence
  Description of Artificial Sequence: Synthetic polypeptide
DIQMTQSPSSLSASVGDRVTITCQAGQDISNYLNWYQQKPGKAPKLLIYDASNLETGVPSRFSGSGSGTDFTLTISSLQPEDFATYYCQQTYSTPITFGQGTKLEIK

SEQ ID NO: 464 - protein, 13 aa, Artificial Sequence
  Description of Artificial Sequence: Synthetic peptide
SRISSDGRITTYA

SEQ ID NO: 465 - protein, 18 aa, Artificial Sequence
  Description of Artificial Sequence: Synthetic peptide
CARGTSYCTGGVCDIDYW

SEQ ID NO: 466 - protein, 11 aa, Artificial Sequence
  Description of Artificial Sequence: Synthetic peptide
RASQSIGRNLN

SEQ ID NO: 467 - protein, 5 aa, Artificial Sequence
  Description of Artificial Sequence: Synthetic peptide
SNLQS

SEQ ID NO: 468 - protein, 9 aa, Artificial Sequence
  Description of Artificial Sequence: Synthetic peptide
QQSYSIPLT

SEQ ID NO: 469 - protein, 123 aa, Artificial Sequence
  Description of Artificial Sequence: Synthetic polypeptide
EVQLVESGGGLVKPGGSLRLSCAASGFTFSSYWMSWVRQAPGKGLEWVSRISSDGRITTYAAPVKGRFTISRDDSKNTLYLQMNSLKTEDTAVYYCARGTSYCTGGVCDIDYWGQGTLVTVSS

SEQ ID NO: 470 - protein, 107 aa, Artificial Sequence
  Description of Artificial Sequence: Synthetic polypeptide
DIQMTQSPSSLSASVGDRVTITCRASQSIGRNLNWYQQKPGKAPKLLIYSASNLQSGVPSRFSGSGSGTDFTLTISSLQPEDFATYYCQQSYSIPLTFGPGTKVDIK

SEQ ID NO: 471 - protein, 120 aa, Artificial Sequence
  Description of Artificial Sequence: Synthetic polypeptide
EVQLLESGGGLVQPGGSLRLSCAASGFTFSNAWMSWVRQAPGKGLEWVSTIVGNGGATYYADSVKGRFTISRDNSKNTLYLQMNSLRAEDTAVYYCARDNPLRWQGMDVWGQGTLVTVSS

SEQ ID NO: 472 - protein, 107 aa, Artificial Sequence
  Description of Artificial Sequence: Synthetic polypeptide
DIQMTQSPSSLSASVGDRVTITCRASQDISNYLNWYQQKPGKAPKLLIYAASSLQSGVPSRFSGSGSGTDFTLTISSLQPEDFATYYCQQSYSIPPTFGPGTKVDIK

SEQ ID NO: 473 - protein, 9 aa, Artificial Sequence
  Description of Artificial Sequence: Synthetic peptide
FTFSSYAMS

SEQ ID NO: 474 - protein, 5 aa, Artificial Sequence
  Description of Artificial Sequence: Synthetic peptide
SGLQS

SEQ ID NO: 475 - protein, 122 aa, Artificial Sequence
  Description of Artificial Sequence: Synthetic polypeptide
EVQLLESGGGLVQPGGSLRLSCAASGFTFSSYAMSWVRQAPGKGLEWVSYISSSSTYTNYADSVKGRFTISRDNSKNTLYLQMNSLRAEDTAVYYCARANSSSWYDWYFDLWGQGTLVTVSS

SEQ ID NO: 476 - protein, 107 aa, Artificial Sequence
  Description of Artificial Sequence: Synthetic polypeptide
DIQMTQSPSSLSASVGDRVTITCRASQSISSYLNWYQQKPGKAPKLLIYAASGLQSGVPSRFSGSGSGTDFTLTISSLQPEDFATYYCQQSYSTPLTFGGGTKVEIK

SEQ ID NO: 477 - protein, 122 aa, Artificial Sequence
  Description of Artificial Sequence: Synthetic polypeptide
EVQLLESGGGLVQPGGSLRLSCAASGFTFSSYQMSWVRQAPGKGLEWVSYISSSSTYTNYADSVKGRFTISRDNSKNTLYLQMNSLRAEDTAVYYCARANSSSWYDWYFDLWGQGTLVTVSS

SEQ ID NO: 478 - protein, 123 aa, Artificial Sequence
  Description of Artificial Sequence: Synthetic polypeptide
EVQLLESGGGLVQPGGSLRLSCAASGFTFSSYAMHWVRQAPGKGLEWVSGISGSGGSAYYADSVKGRFTISRDNSKNTLYLQMNSLRAEDTAVYYCATSQAPVDYYYYGMDVWGQGTTVTVSS

SEQ ID NO: 479 - protein, 107 aa, Artificial Sequence
  Description of Artificial Sequence: Synthetic polypeptide
DIQMTQSPSSLSASVGDRVTITCRASQSISSWLAWYQQKPGKAPKLLIYAASNLQRGVPSRFSGSGSGTDFTLTISSLQPEDFATYYCQQSYSIPITFGQGTKVEIK

SEQ ID NO: 480 - protein, 122 aa, Artificial Sequence
  Description of Artificial Sequence: Synthetic polypeptide
EVQLVESGGGLVKPGGSLRLSCAASGFTFSSYWMSWVRQAPGKGLEWVSYISGSSSYTNYAAPVKGRFTISRDDSKNTLYLQMNSLKTEDTAVYYCARVGSSGWYDWYFDLWGRGTLVTVSS

SEQ ID NO: 481 - protein, 107 aa, Artificial Sequence [sequence omitted]

SEQ ID NO: 482 - protein, 118 aa, Artificial Sequence
  Description of Artificial Sequence: Synthetic polypeptide
QVQLVQSGAEVKKPGASVKVSCKASGYTLTTWYMYWVRQAPGQGLEWMGWINPNRGATNYAQKFQGRVTMTRDTSTSTVYMELSSLRSEDTAVYYCAKGDLWGAMDVWGQGTTVTVSS

SEQ ID NO: 483 - protein, 129 aa, Artificial Sequence
  Description of Artificial Sequence: Synthetic polypeptide
QVQLVQSGAEVKKPGASVKVSCKASGYTFTGYYIHWVRQAPGQGLEWMGWMNPNSGNTGYAQKFQGRVTMTRDTSTSTVYMELSSLRSEDTAVYYCARDPGFLGYCSGGSCYDGWFDPWGQGTLVTVSS

SEQ ID NO: 484 - protein, 107 aa, Artificial Sequence
  Description of Artificial Sequence: Synthetic polypeptide
DIQMTQSPSSLSASVGDRVTITCRASQSISSYLHWYQQKPGKAPKLLIYAASSLQSGVPSRFSGSGSGTDFTLTISSLQPEDFATYYCQQSYTAPYTFGQGTKLEIK

SEQ ID NO: 485 - protein, 24 aa, Artificial Sequence
  Description of Artificial Sequence: Synthetic peptide
CARDPGFLGYSSGGSCYDGWFDPW

SEQ ID NO: 486 - protein, 129 aa, Artificial Sequence
  Description of Artificial Sequence: Synthetic polypeptide
QVQLVQSGAEVKKPGASVKVSCKASGYTFTGYYIHWVRQAPGQGLEWMGWMNPNSGNTGYAQKFQGRVTMTRDTSTSTVYMELSSLRSEDTAVYYCARDPGFLGYSSGGSSYDGWFDPWGQGTLVTVSS

SEQ ID NO: 487 - protein, 9 aa, Artificial Sequence
  Description of Artificial Sequence: Synthetic peptide
FTFDDYALH

SEQ ID NO: 488 - protein, 13 aa, Artificial Sequence
  Description of Artificial Sequence: Synthetic peptide
SAISGDGRSTTYA

SEQ ID NO: 489 - protein, 17 aa, Artificial Sequence
  Description of Artificial Sequence: Synthetic peptide
CARDGTVNGATGWFDPW

SEQ ID NO: 490 - protein, 11 aa, Artificial Sequence
  Description of Artificial Sequence: Synthetic peptide
QASQDISKYLN

SEQ ID NO: 491 - protein, 5 aa, Artificial Sequence
  Description of Artificial Sequence: Synthetic peptide
SNLET

SEQ ID NO: 492 - protein, 9 aa, Artificial Sequence
  Description of Artificial Sequence: Synthetic peptide
QQSYSIPFT

SEQ ID NO: 493 - protein, 122 aa, Artificial Sequence
  Description of Artificial Sequence: Synthetic polypeptide
EVQLLESGGGLVQPGGSLRLSCAASGFTFDDYALHWVRQAPGKGLEWVSAISGDGRSTTYADSVKGRFTISRDNSKNTLYLQMNSLRAEDTAVYYCARDGTVNGATGWFDPWGQGTLVTVSS

SEQ ID NO: 494 - protein, 107 aa, Artificial Sequence
  Description of Artificial Sequence: Synthetic polypeptide
DIQMTQSPSSLSASVGDRVTITCQASQDISKYLNWYQQKPGKAPKLLIYDASNLETGVPSRFSGSGSGTDFTLTISSLQPEDFATYYCQQSYSIPFTFGPGTKVDIK

SEQ ID NO: 495 - protein, 9 aa, Artificial Sequence
  Description of Artificial Sequence: Synthetic peptide
FTFSDYGMP

SEQ ID NO: 496 - protein, 121 aa, Artificial Sequence
  Description of Artificial Sequence: Synthetic polypeptide
EVQLLESGGGLVQPGGSLRLSCAASGFTFSDYGMPWVRQAPGKGLEWVSAISGSGGSTYYADSVKGRFTISRDNSKNTLYLQMNSLRAEDTAVYYCARDGGWQPAAILDYWGQGTLVTVSS

SEQ ID NO: 497 - protein, 107 aa, Artificial Sequence
  Description of Artificial Sequence: Synthetic polypeptide
DIQMTQSPSSLSASVGDRVTITCRASQGISNNLNWYQQKPGKAPKLLIYDASNLETGVPSRFSGSGSGTDFTLTISSLQPEDFATYYCQQSYSTPLTFGQGTKVEIK

SEQ ID NO: 498 - protein, 118 aa, Artificial Sequence
  Description of Artificial Sequence: Synthetic polypeptide
QVQLVQSGAEVKKPGASVKVSCKASGYTFTDYFLHWVRQAPGQGLEWMGWMNPTSGNTGYAQKFQGRVTMTRDTSTSTVYMELSSLRSEDTAVYYCAREGEGSGFDYWGQGTLVTVSS

SEQ ID NO: 499 - protein, 107 aa, Artificial Sequence
  Description of Artificial Sequence: Synthetic polypeptide
DIQMTQSPSSLSASVGDRVTITCRASQGINSWLAWYQQKPGKAPKLLIYDASNLETGVPSRFSGSGSGTDFTLTISSLQPEDFATYYCQQSYSTPLTFGGGTKVEIK

SEQ ID NO: 500 - protein, 120 aa, Artificial Sequence
  Description of Artificial Sequence: Synthetic polypeptide
QVQLVQSGAEVKKPGASVKVSCKASGYTFTSYYMHWVRQAPGQGLEWMAWMNPNSGNTGYAQKFQGRVTMTRDTSTSTVYMELSSLRSEDTAVYYCARDYDFWSGSLGYWGQGTLVTVSS

SEQ ID NO: 501 - protein, 107 aa, Artificial Sequence
  Description of Artificial Sequence: Synthetic polypeptide
DIQMTQSPSSLSASVGDRVTITCRASQGISNYLAWYQQKPGKAPKLLIYAASSLQSGVPSRFSGSGSGTDFTLTISSLQPEDFATYYCQQSYSTPWTFGQGTKVEIK

SEQ ID NO: 502 - protein, 125 aa, Artificial Sequence
  Description of Artificial Sequence: Synthetic polypeptide
QVQLVQSGAEVKKPGASVKVSCKASGYTFTSYYMHWVRQAPGQGLEWMGIINPSGGSTSYAQKFQGRVTMTRDTSTSTVYMELSSLRSEDTAVYYCARDTGYSYGRYYYYGMDVWGQGTLVTVSS

SEQ ID NO: 503 - protein, 107 aa, Artificial Sequence
  Description of Artificial Sequence: Synthetic polypeptide
DIQMTQSPSSLSASVGDRVTITCRASQSIGRWLAWYQQKPGKAPKLLIYDASNLQSGVPSRFSGSGSGTDFTLTISSLQPEDFATYYCQQSYSIPITFGQGTKVEIK

SEQ ID NO: 504 - protein, 121 aa, Artificial Sequence
  Description of Artificial Sequence: Synthetic polypeptide
QVQLVQSGAEVKKPGASVKVSCKASGYTLTDYYMHWVRQAPGQGLEWMGIINPSGGSTSYAQKFQGRVTMTRDTSTSTVYMELSSLRSEDTAVYYCAREEYSSSSGYFDYWGQGTLVTVSS

SEQ ID NO: 505 - protein, 107 aa, Artificial Sequence
  Description of Artificial Sequence: Synthetic polypeptide
DIQMTQSPSSLSASVGDRVTITCRASQGISSWLAWYQQKPGKAPKLLIYAASSLQSGVPSRFSGSGSGTDFTLTISSLQPEDFATYYCQQSYSTPLTFGQGTKVEIK

SEQ ID NO: 506 - protein, 120 aa, Artificial Sequence
  Description of Artificial Sequence: Synthetic polypeptide
QVQLVQSGAEVKKPGASVKVSCKASGYTFTSYGISWVRQAPGQGLEWMGWMHPKSGDTGLTQKFQGRVTMTRDTSTSTVYMELSSLRSEDTAVYYCARDTPYYYYGMDVWGQGTTVTVSS

SEQ ID NO: 507 - protein, 107 aa, Artificial Sequence
  Description of Artificial Sequence: Synthetic polypeptide
DIQMTQSPSSLSASVGDRVTITCRASQSISSWLAWYQQKPGKAPKLLIYAASSLQSGVPSRFSGSGSGTDFTLTISSLQPEDFATYYCQQSYSVPITFGQGTKVEIK

SEQ ID NO: 508 - protein, 14 aa, Artificial Sequence
  Description of Artificial Sequence: Synthetic peptide
CAKERFIDYGMDVW

SEQ ID NO: 509 - protein, 8 aa, Artificial Sequence
  Description of Artificial Sequence: Synthetic peptide
QQTYSGWT

SEQ ID NO: 510 - protein, 119 aa, Artificial Sequence
  Description of Artificial Sequence: Synthetic polypeptide
EVQLLESGGGLVQPGGSLRLSCAASGFTFSSYAMSWVRQAPGKGLEWVSAISGSGGSTYYADSVKGRFTISRDNSKNTLYLQMNSLRAEDTAVYYCAKERFIDYGMDVWGQGTTVTVSS

SEQ ID NO: 511 - protein, 106 aa, Artificial Sequence
  Description of Artificial Sequence: Synthetic polypeptide
DIQMTQSPSSLSASVGDRVTITCQASQDISNYLNWYQQKPGKAPKLLIYAASSLQSGVPSRFSGSGSGTDFTLTISSLQPEDFATYYCQQTYSGWTFGPGTKVDIK

SEQ ID NO: 512 - protein, 121 aa, Artificial Sequence
  Description of Artificial Sequence: Synthetic polypeptide
EVQLVESGGGLVKPGGSLRLSCAASGFTFGDYAMSWVRQAPGKGLEWVSYISGDIGYTNYAAPVKGRFTISRDDSKNTLYLQMNSLKTEDTAVYYCARDVAATGNWYFDLWGRGTLVTVSS

SEQ ID NO: 513 - protein, 123 aa, Artificial Sequence
  Description of Artificial Sequence: Synthetic polypeptide
EVQLLESGGGLVQPGGSLRLSCAASGFSFSSYTMNWVRQAPGKGLEWVSFITSSSRTIYYADSVKGRFTISRDNSKNTLYLQMNSLRAEDTAVYYCARDRRGDYGDSWYFDLWGRGTLVTVSS

SEQ ID NO: 514 - protein, 107 aa, Artificial Sequence
  Description of Artificial Sequence: Synthetic polypeptide
EIVMTQSPATLSVSPGERATLSCRASQSVRNYLAWYQQKPGQAPRLLIYGASTRATGIPARFSGSGSGTEFTLTISSLQSEDFAVYYCQQYGSSPLTFGGGTKVEIK

SEQ ID NO: 515 - protein, 121 aa, Artificial Sequence
  Description of Artificial Sequence: Synthetic polypeptide
QVQLVQSGAEVKKPGASVKVSCKASGYTFSKHFVHWVRQAPGQGLEWMGWMNPNSGNSGYAQKFQGRVTMTRDTSTSTVYMELSSLRSEDTAVYYCARGEGGYYYYGMDVWGQGTLVTVSS

SEQ ID NO: 516 - protein, 107 aa, Artificial Sequence
  Description of Artificial Sequence: Synthetic polypeptide
DIQMTQSPSSLSASVGDRVTITCRASQSISSWLAWYQQKPGKAPKLLIYAASTLQSGVPSRFSGSGSGTDFTLTISSLQPEDFATYYCQQSYSTPWTFGQGTKVEIK

SEQ ID NO: 517 - protein, 120 aa, Artificial Sequence
  Description of Artificial Sequence: Synthetic polypeptide
EVQLLESGGGLVQPGGSLRLSCAASGFTFGSYSMSWVRQAPGKGLEWVSAIGTGGGTYYADSVKGRFTISRDNSKNTLYLQMNSLRAEDTAVYYCAKGTPYYYYYGMDVWGQGTMVTVSS

SEQ ID NO: 518 - protein, 107 aa, Artificial Sequence
  Description of Artificial Sequence: Synthetic polypeptide
DIQMTQSPSSLSASVGDRVTITCRASQPLSNWLAWYQQKPGKAPKLLIYAASSLQSGVPSRFSGSGSGTDFTLTISSLQPEDFATYYCQQAISFPLTFGGGTKVEIK

SEQ ID NO: 519 - protein, 125 aa, Artificial Sequence
  Description of Artificial Sequence: Synthetic polypeptide
QVQLVQSGAEVKKPGASVKVSCKASGYTFTSYYMHWVRQAPGQGLEWMGWMNPNSGNTGYAQKFQGRVTMTRDTSTSTVYMELSSLRSEDTAVYYCARDLGYYDSSGYFGAFDIWGQGTTVTVSS

SEQ ID NO: 520 - protein, 107 aa, Artificial Sequence
  Description of Artificial Sequence: Synthetic polypeptide
DIQMTQSPSSLSASVGDRVTITCQSSEDISSSLNWYQQKPGKAPKLLIYAASSLQIGVPSRFSGSGSGTDFTLTISSLQPEDFATYYCQQTYSTPYTFGQGTKVEIK

SEQ ID NO: 521 - protein, 122 aa, Artificial Sequence
  Description of Artificial Sequence: Synthetic polypeptide
QVQLVQSGAEVKKPGASVKVSCKASGYTFTSYGISWVRQAPGQGLEWMGIINPRGGSTIFAQKFQGRVTMTRDTSTSTVYMELSSLRSEDTAVYYCARGTRSSGWYGWFDPWGQGTLVTVSS

SEQ ID NO: 522 - protein, 107 aa, Artificial Sequence
  Description of Artificial Sequence: Synthetic polypeptide
DIQMTQSPSSLSASVGDRVTITCRASQGIGNWLAWYQQKPGKAPKLLIYAASNLETGVPSRFSGSGSGTDFTLTISSLQPEDFATYYCQQIHSYPLTFGGGTKVEIK

SEQ ID NO: 523 - protein, 120 aa, Artificial Sequence
  Description of Artificial Sequence: Synthetic polypeptide
EVQLVESGGGLVKPGGSLRLSCAASGFIFQDSAIHWVRQAPGKGLEWVSAIGTGGGTYYAAPVKGRFTISRDDSKNTLYLQMNSLKTEDTAVYYCARSYCSGGSCSLGSWGQGTLVTVSS

SEQ ID NO: 524 - protein, 112 aa, Artificial Sequence
  Description of Artificial Sequence: Synthetic polypeptide
DIVMTQSPLSLPVTPGEPASISCRSSQSLLHSNGYNYLDWYLQKPGQSPQLLIYDASNLETGVPDRFSGSGSGTDFTLKISRVEAEDVGVYYCMQALQTPLTFGQGTKVEIK

SEQ ID NO: 525 - protein, 121 aa, Artificial Sequence
  Description of Artificial Sequence: Synthetic polypeptide
EVQLLESGGGLVQPGGSLRLSCAASGFTFDDYGMSWVRQAPGKGLEWVSYISSSSSYIYYADSVKGRFTISRDNSKNTLYLQMNSLRAEDTAVYYCAREIAAAGFYGMDVWGQGTTVTVSS

SEQ ID NO: 526 - protein, 23 aa, Artificial Sequence
  Description of Artificial Sequence: Synthetic peptide
CAREGLGYCTNGVCWNYYGMDVW

SEQ ID NO: 527 - protein, 9 aa, Artificial Sequence
  Description of Artificial Sequence: Synthetic peptide
QQSYSTPYT

SEQ ID NO: 528 - protein, 128 aa, Artificial Sequence
  Description of Artificial Sequence: Synthetic polypeptide
QVQLVQSGAEVKKPGASVKVSCKASGYTFTSYYMHWVRQAPGQGLEWMGWMNPNSGNTGYAQKFQGRVTMTRDTSTSTVYMELSSLRSEDTAVYYCAREGLGYCTNGVCWNYYGMDVWGQGTLVTVSS

SEQ ID NO: 529 - protein, 107 aa, Artificial Sequence
  Description of Artificial Sequence: Synthetic polypeptide
DIQMTQSPSSLSASVGDRVTITCRASQGISSWLAWYQQKPGKAPKLLIYGASSLQSGVPSRFSGSGSGTDFTLTISSLQPEDFATYYCQQSYSTPYTFGQGTKVEIK

SEQ ID NO: 530 - protein, 126 aa, Artificial Sequence
  Description of Artificial Sequence: Synthetic polypeptide
QVQLVQSGAEVKKPGSSVKVSCKASGGTLSRYGVSWVRQAPGQGLEWMGGIIPIFGTTNYAQKFQGRVTITADESTSTAYMELSSLRSEDTAVYYCARDRVYYDSSGYPTWYFDLWGRGTLVTVSS

SEQ ID NO: 531 - protein, 108 aa, Artificial Sequence
  Description of Artificial Sequence: Synthetic polypeptide
EIVMTQSPATLSVSPGERATLSCRASQSVSSSYLAWYQQKPGQAPRLLIYGASTRATGIPARFSGSGSGTEFTLTISSLQSEDFAVYYCQQYGSSPITFGQGTKVEIK

SEQ ID NO: 532 - protein, 121 aa, Artificial Sequence
  Description of Artificial Sequence: Synthetic polypeptide
EVQLLESGGGLVQPGGSLRLSCAASGFTFDDFAMHWVRQAPGKGLEWVSGISGNGDSRYYADSVKGRFTISRDNSKNTLYLQMNSLRAEDTAVYYCARDASYGGNYGMDVWGQGTTVTVSS

SEQ ID NO: 533 - protein, 107 aa, Artificial Sequence
  Description of Artificial Sequence: Synthetic polypeptide
DIQMTQSPSSLSASVGDRVTITCQASQDIRNYLNWYQQKPGKAPKLLIYKASTLESGVPSRFSGSGSGTDFTLTISSLQPEDFATYYCQQANSFPLTFGPGTKVDIK

SEQ ID NO: 534 - protein, 119 aa, Artificial Sequence
  Description of Artificial Sequence: Synthetic polypeptide
EVQLVESGGGLVKPGGSLRLSCAASGFTFSSYWMSWVRQAPGKGLEWVSAIGTGGGTYYAAPVKGRFTISRDDSKNTLYLQMNSLKTEDTAVYYCAREWLVPYYGMDVWGQGTTVTVSS

SEQ ID NO: 535 - protein, 107 aa, Artificial Sequence
  Description of Artificial Sequence: Synthetic polypeptide
DIQMTQSPSSLSASVGDRVTITCRASQSISRWLAWYQQKPGKAPKLLIYGASNLQSGVPSRFSGSGSGTDFTLTISSLQPEDFATYYCQQSYSTPWTFGQGTKVEIK

SEQ ID NO: 536 - protein, 120 aa, Artificial Sequence
  Description of Artificial Sequence: Synthetic polypeptide
EVQLLESGGGLVQPGGSLRLSCAASGFSVSSNYMSWVRQAPGKGLEWVAGISYDGSSKPYADSVKGRFTISRDNSKNTLYLQMNSLRAEDTAVYYCARSRGIAARPLQHWGQGTLVTVSS

SEQ ID NO: 537 - protein, 113 aa, Artificial Sequence
  Description of Artificial Sequence: Synthetic polypeptide
DIVMTQSPDSLAVSLGERATINCKSSQSVLYSSNNKNYLAWYQQKPGQPPKLLIYWASTRQSGVPDRFSGSGSGTDFTLTISSLQAEDVAVYYCHQYYGHPPTFGGGTKVEIK

SEQ ID NO: 538 - protein, 113 aa, Artificial Sequence
  Description of Artificial Sequence: Synthetic polypeptide
DIVMTQSPDSLAVSLGERATINCKSSQSVLYSSNNKNYLAWYQQKPGQPPKLLIYQASTRQSGVPDRFSGSGSGTDFTLTISSLQAEDVAVYYCHQYYGHPPTFGGGTKVEIK

SEQ ID NO: 539 - protein, 121 aa, Artificial Sequence
  Description of Artificial Sequence: Synthetic polypeptide
EVQLLESGGGLVQPGGSLRLSCAASGFSFSDYGMHWVRQAPGKGLEWVSAISGSGGSTYYADSVKGRFTISRDNSKNTLYLQMNSLRAEDTAVYYCARDGGWQPAAILDYWGQGTLVTVSS

SEQ ID NO: 540 - protein, 107 aa, Artificial Sequence
  Description of Artificial Sequence: Synthetic polypeptide
DIQMTQSPSSLSASVGDRVTITCRASQGISNNLNWYQQKPGKAPKLLIYDASNLETGVPSRFSGSGSGTDFTLTISSLQPEDFATYYCQQSYSTPLTFGGGTKVEIK

SEQ ID NO: 541 - protein, 120 aa, Artificial Sequence
  Description of Artificial Sequence: Synthetic polypeptide
EVQLLESGGGLVQPGGSLRLSCAASGFTFSDHGMHWVRQAPGKGLEWVSVIYGGESTYYADSVKGRFTISRDNSKNTLYLQMNSLRAEDTAVYYCARDPAVAGGGIFDYWGQGTLVTVSS

SEQ ID NO: 542 - protein, 107 aa, Artificial Sequence
  Description of Artificial Sequence: Synthetic polypeptide
DIQMTQSPSSLSASVGDRVTITCRASQGISNYLAWYQQKPGKAPKLLIYDASNLETGVPSRFSGSGSGTDFTLTISSLQPEDFATYYCQQSYSTCYTFGQGTKLEIK

SEQ ID NO: 543 - protein, 122 aa, Artificial Sequence
  Description of Artificial Sequence: Synthetic polypeptide
QVQLVQSGAEVKKPGASVKVSCKASGDTFTGYYIHWVRQAPGQGLEWMGWINPNSGGTNYAQKFQGRVTMTRDTSTSTVYMELSSLRSEDTAVYYCARSGLWLGSYYGMDVWGQGTLVTVSS

SEQ ID NO: 544 - protein, 107 aa, Artificial Sequence
  Description of Artificial Sequence: Synthetic polypeptide
DIQMTQSPSSLSASVGDRVTITCRASQTISIWLAWYQQKPGKAPKLLIYDASTLQSGVPSRFSGSGSGTDFTLTISSLQPEDFATYYCQQYSSYPLTFGQGTKVEIK

SEQ ID NO: 545 - protein, 119 aa, Artificial Sequence
  Description of Artificial Sequence: Synthetic polypeptide
QVQLVQSGAEVKKPGASVKVSCKASGYTFTSYDINWVRQAPGQGLEWMGWINPNSGTTGYAQKFQGRVTMTRDTSTSTVYMELSSLRSEDTAVYYCARSPYYYYGMDVWGQGTTVTVSS

SEQ ID NO: 546 - protein, 106 aa, Artificial Sequence
  Description of Artificial Sequence: Synthetic polypeptide
DIQMTQSPSSLSASVGDRVTITCRASHFISRWVAWYQQKPGKAPKLLIYAASTLQSGVPSRFSGSGSGTDFTLTISSLQPEDFATYYCQQSYSGISFGPGTKVDIK

SEQ ID NO: 547 - protein, 119 aa, Artificial Sequence
  Description of Artificial Sequence: Synthetic polypeptide
EVQLLESGGGLVQPGGSLRLSCAASGFTFNNYGMNWVRQAPGKGLEWVSRINSDGSSTSYADSVKGRFTISRDNSKNTLYLQMNSLRAEDTAVYYCARGAYYYYYMDVWGQGTLVTVSS

SEQ ID NO: 548 - protein, 107 aa, Artificial Sequence
  Description of Artificial Sequence: Synthetic polypeptide
EIVMTQSPATLSVSPGERATLSCRASQSVSGSYLAWYQQKPGQAPRLLIYATSSRASGIPARFSGSGSGTEFTLTISSLQSEDFAVYYCQQYYSGLTFGQGTKVEIK

SEQ ID NO: 549 - protein, 122 aa, Artificial Sequence
  Description of Artificial Sequence: Synthetic polypeptide
EVQLLESGGGLVQPGGSLRLSCAASGFTFSNSDMNWVRQAPGKGLEWVAHIWNDGSQKYYADSVKGRFTISRDNSKNTLYLQMNSLRAEDTAVYYCARDRTDPGYSSAMDVWGQGTTVTVSS

SEQ ID NO: 550 - protein, 107 aa, Artificial Sequence
  Description of Artificial Sequence: Synthetic polypeptide
DIQMTQSPSSLSASVGDRVTITCRASQDIRNYLGWYQQKPGKAPKLLIYDASSLETGVPSRFSGSGSGTDFTLTISSLQPEDFATYYCQQATSLPLTFGGGTKVEIK

SEQ ID NO: 551 - protein, 120 aa, Artificial Sequence
  Description of Artificial Sequence: Synthetic polypeptide
QVQLVQSGAEVKKPGASVKVSCKASGYTFTSYDINWVRQAPGQGLEWMGWMNPNSGNTGYAQKFQGRVTMTRDTSTSTVYMELSSLRSEDTAVYYCAKDSDYSNLLWDYWGQGTLVTVSS

SEQ ID NO: 552 - protein, 107 aa, Artificial Sequence
  Description of Artificial Sequence: Synthetic polypeptide
DIQMTQSPSSLSASVGDRVTITCRASQDITNDLGWYQQKPGKAPKLLIYQASSLESGVPSRFSGSGSGTDFTLTISSLQPEDFATYYCQQSYTIPLTFGQGTKVEIK

SEQ ID NO: 553 - protein, 19 aa, Artificial Sequence
  Description of Artificial Sequence: Synthetic peptide
CARDGAWFGEEYYYGMDVW

SEQ ID NO: 554 - protein, 11 aa, Artificial Sequence
  Description of Artificial Sequence: Synthetic peptide
RASQGISNWLA

SEQ ID NO: 555 - protein, 10 aa, Artificial Sequence
  Description of Artificial Sequence: Synthetic peptide
QQYYSFPLYT

SEQ ID NO: 556 - protein, 124 aa, Artificial Sequence
  Description of Artificial Sequence: Synthetic polypeptide
QVQLVQSGAEVKKPGASVKVSCKASGYTFTGHYMHWVRQAPGQGLEWMGIINPSGGSTSYAQKFQGRVTMTRDTSTSTVYMELSSLRSEDTAVYYCARDGAWFGEEYYYGMDVWGQGTTVTVSS

SEQ ID NO: 557 - protein, 108 aa, Artificial Sequence
  Description of Artificial Sequence: Synthetic polypeptide
DIQMTQSPSSLSASVGDRVTITCRASQGISNWLAWYQQKPGKAPKLLIYDASNLETGVPSRFSGSGSGTDFTLTISSLQPEDFATYYCQQYYSFPLYTFGQGTKVEIK

SEQ ID NO: 558 - protein, 13 aa, Artificial Sequence
  Description of Artificial Sequence: Synthetic peptide
GMIYPRDGSTSYA

SEQ ID NO: 559 - protein, 13 aa, Artificial Sequence
  Description of Artificial Sequence: Synthetic peptide
CAMTGWGYGMDVW

SEQ ID NO: 560 - protein, 11 aa, Artificial Sequence
  Description of Artificial Sequence: Synthetic peptide
RASQGINNYLA

SEQ ID NO: 561 - protein, 9 aa, Artificial Sequence
  Description of Artificial Sequence: Synthetic peptide
QQSYSAPPT

SEQ ID NO: 562 - protein, 118 aa, Artificial Sequence
  Description of Artificial Sequence: Synthetic polypeptide
QVQLVQSGAEVKKPGASVKVSCKASGYTFTGYYMHWVRQAPGQGLEWMGMIYPRDGSTSYAQKFQGRVTMTRDTSTSTVYMELSSLRSEDTAVYYCAMTGWGYGMDVWGKGTTVTVSS

SEQ ID NO: 563 - protein, 107 aa, Artificial Sequence
  Description of Artificial Sequence: Synthetic polypeptide
DIQMTQSPSSLSASVGDRVTITCRASQGINNYLAWYQQKPGKAPKLLIYDASTLQSGVPSRFSGSGSGTDFTLTISSLQPEDFATYYCQQSYSAPPTFGQGTKLEIK

SEQ ID NO: 564 - protein, 121 aa, Artificial Sequence
  Description of Artificial Sequence: Synthetic polypeptide
EVQLLESGGGLVQPGGSLRLSCAASGFTFGDYAMSWVRQAPGKGLEWVAVVSYDGTNKYYADSVKGRFTISRDNSKNTLYLQMNSLRAEDTAVYYCAKDICSSTSCYFDLWGRGTLVTVSS

SEQ ID NO: 565 - protein, 107 aa, Artificial Sequence
  Description of Artificial Sequence: Synthetic polypeptide
DIQMTQSPSSLSASVGDRVTITCRASQNINNYVNWYQQKPGKAPKLLIYDASNLETGVPSRFSGSGSGTDFTLTISSLQPEDFATYYCQQANSFPPTFGQGTRLEIK

SEQ ID NO: 566 - protein, 122 aa, Artificial Sequence
  Description of Artificial Sequence: Synthetic polypeptide
QVQLVQSGAEVKKPGASVKVSCKASGYTFTSYYMHWVRQAPGQGLEWMGIIDPSGGSTSYAQKFQGRVTMTRDTSTSTVYMELSSLRSEDTAVYYCAREEWSSGGVGYFDYWGQGTLVTVSS

SEQ ID NO: 567 - protein, 107 aa, Artificial Sequence
  Description of Artificial Sequence: Synthetic polypeptide
DIQMTQSPSSLSASVGDRVTITCRASQGISSYLAWYQQKPGKAPKLLIYATSSLQTGVPSRFSGSGSGTDFTLTISSLQPEDFATYYCQQTYSIPITFGQGTRLEIK

SEQ ID NO: 568 - protein, 9 aa, Artificial Sequence
  Description of Artificial Sequence: Synthetic peptide
YPFTDYYMH

SEQ ID NO: 569 - protein, 13 aa, Artificial Sequence
  Description of Artificial Sequence: Synthetic peptide
GWIKPNSGDTEYA

SEQ ID NO: 570 - protein, 20 aa, Artificial Sequence
  Description of Artificial Sequence: Synthetic peptide
CARDRFVGKPDYYYYGMDVW

SEQ ID NO: 571 - protein, 11 aa, Artificial Sequence
  Description of Artificial Sequence: Synthetic peptide
RASQSISVWLA

SEQ ID NO: 572 - protein, 9 aa, Artificial Sequence
  Description of Artificial Sequence: Synthetic peptide
QQSYDTPYT

SEQ ID NO: 573 - protein, 125 aa, Artificial Sequence
  Description of Artificial Sequence: Synthetic polypeptide
QVQLVQSGAEVKKPGASVKVSCKASGYPFTDYYMHWVRQAPGQGLEWMGWIKPNSGDTEYAQKFQGRVTMTRDTSTSTVYMELSSLRSEDTAVYYCARDRFVGKPDYYYYGMDVWGQGTMVTVSS

SEQ ID NO: 574 - protein, 107 aa, Artificial Sequence
  Description of Artificial Sequence: Synthetic polypeptide
DIQMTQSPSSLSASVGDRVTITCRASQSISVWLAWYQQKPGKAPKLLIYAASSLQSGVPSRFSGSGSGTDFTLTISSLQPEDFATYYCQQSYDTPYTFGQGTKLEIK

SEQ ID NO: 575 - protein, 124 aa, Artificial Sequence
  Description of Artificial Sequence: Synthetic polypeptide
QVQLVQSGAEVKKPGASVKVSCKASGYTFTSYYMHWVRQAPGQGLEWMGIINPSGGSTSYAQKFQGRVTMTRDTSTSTVYMELSSLRSEDTAVYYCARDSVAGTGGRYYGMDVWGQGTLVTVSS

SEQ ID NO: 576 - protein, 107 aa, Artificial Sequence
  Description of Artificial Sequence: Synthetic polypeptide
DIQMTQSPSSLSASVGDRVTITCRASQGISNYFAWYQQKPGKAPKLLIYAASSLQGGVPSRFSGSGSGTDFTLTISSLQPEDFATYYCQQSYSLPYTFGQGTKLEIK

SEQ ID NO: 577 - protein, 13 aa, Artificial Sequence
  Description of Artificial Sequence: Synthetic peptide
GVINPIGGTTTYA

SEQ ID NO: 578 - protein, 16 aa, Artificial Sequence
  Description of Artificial Sequence: Synthetic peptide
CASGAPSYYYYGMDVW

SEQ ID NO: 579 - protein, 5 aa, Artificial Sequence
  Description of Artificial Sequence: Synthetic peptide
SYLAT

SEQ ID NO: 580 - protein, 121 aa, Artificial Sequence
  Description of Artificial Sequence: Synthetic polypeptide
QVQLVQSGAEVKKPGASVKVSCKASGYTFTSYYMHWVRQAPGQGLEWMGVINPIGGTTTYAQKFQGRVTMTRDTSTSTVYMELSSLRSEDTAVYYCASGAPSYYYYGMDVWGQGTLVTVSS

SEQ ID NO: 581 - protein, 107 aa, Artificial Sequence
  Description of Artificial Sequence: Synthetic polypeptide
DIQMTQSPSSLSASVGDRVTITCRASQSISSYLNWYQQKPGKAPKLLIYGTSYLATGVPSRFSGSGSGTDFTLTISSLQPEDFATYYCQQSYSTPLTFGQGTKVEIK

SEQ ID NO: 582 - protein, 9 aa, Artificial Sequence
  Description of Artificial Sequence: Synthetic peptide
YTFTSNYVH

SEQ ID NO: 583 - protein, 13 aa, Artificial Sequence
  Description of Artificial Sequence: Synthetic peptide
GRINPHSGDTSYA

SEQ ID NO: 584 - protein, 16 aa, Artificial Sequence
  Description of Artificial Sequence: Synthetic peptide
CARAGQLWSDWYFDLW

SEQ ID NO: 585 - protein, 5 aa, Artificial Sequence
  Description of Artificial Sequence: Synthetic peptide
TALRT

SEQ ID NO: 586 - protein, 9 aa, Artificial Sequence
  Description of Artificial Sequence: Synthetic peptide
QQSYSHPLT

SEQ ID NO: 587 - protein, 121 aa, Artificial Sequence
  Description of Artificial Sequence: Synthetic polypeptide
QVQLVQSGAEVKKPGASVKVSCKASGYTFTSNYVHWVRQAPGQGLEWMGRINPHSGDTSYAQKFQGRVTMTRDTSTSTVYMELSSLRSEDTAVYYCARAGQLWSDWYFDLWGRGTLVTVSS

SEQ ID NO: 588 - protein, 107 aa, Artificial Sequence
  Description of Artificial Sequence: Synthetic polypeptide
DIQMTQSPSSLSASVGDRVTITCQASQDIRNYLNWYQQKPGKAPKLLIYAATALRTGVPSRFSGSGSGTDFTLTISSLQPEDFATYYCQQSYSHPLTFGQGTKVEIK

SEQ ID NO: 589 - protein, 118 aa, Artificial Sequence
  Description of Artificial Sequence: Synthetic polypeptide
QVQLVQSGAEVKKPGASVKVSCKASGYTFTGYYMHWVRQAPGQGLEWMGIINPSGGNTKYAQKFQGRVTMTRDTSTSTVYMELSSLRSEDTAVYYCTTADYYYYMDVWGKGTTVTVSS

SEQ ID NO: 590 - protein, 106 aa, Artificial Sequence
  Description of Artificial Sequence: Synthetic polypeptide
DIQMTQSPSSLSASVGDRVTITCRASQGISNYLAWYQQKPGKAPKLLIYAASSLQSGVPSRFSGSGSGTDFTLTISSLQPEDFATYYCQQYYSNADFGQGTKVEIK

SEQ ID NO: 591 - protein, 119 aa, Artificial Sequence
  Description of Artificial Sequence: Synthetic polypeptide
EVQLLESGGGLVQPGGSLRLSCAASGFTFSDFWMHWVRQAPGKGLEWISYISGDSGYTNYADSVKGRFTISRDNSKNTLYLQMNSLRAEDTAVYYCARDRPYYYYMDVWGKGTTVTVSS

SEQ ID NO: 592 - protein, 107 aa, Artificial Sequence
  Description of Artificial Sequence: Synthetic polypeptide
DIQMTQSPSSLSASVGDRVTITCRASQSVSRSLAWYQQKPGKAPKLLIYAASSLQSGVPSRFSGSGSGTDFTLTISSLQPEDFATYYCQQYKSYPVTFGQGTKVEIK

SEQ ID NO: 593 - protein, 122 aa, Artificial Sequence
  Description of Artificial Sequence: Synthetic polypeptide
EVQLLESGGGLVQPGGSLRLSCAASGFTFDDYTMHWVRQAPGKGLEWVSDISGSGGSTYYADSVKGRFTISRDNSKNTLYLQMNSLRAEDTAVYYCAKDVVVAGTPLHFDYWGQGTLVTVSS

SEQ ID NO: 594 - protein, 107 aa, Artificial Sequence
  Description of Artificial Sequence: Synthetic polypeptide
DIQMTQSPSSLSASVGDRVTITCQASQDISNYLNWYQQKPGKAPKLLIYAASYLQSGVPSRFSGSGSGTDFTLTISSLQPEDFATYYCQQAHNYPITFGQGTRLEIK

SEQ ID NO: 595 - protein, 119 aa, Artificial Sequence
  Description of Artificial Sequence: Synthetic polypeptide
EVQLLESGGGLVQPGGSLRLSCAASEFTFSNAWMSWVRQAPGKGLEWVASISSTSAYIDYADSVKGRFTISRDNSKNTLYLQMNSLRAEDTAVYYCAREVVGATTFDYWGQGTLVTVSS

SEQ ID NO: 596 - protein, 107 aa, Artificial Sequence
  Description of Artificial Sequence: Synthetic polypeptide
DIQMTQSPSSLSASVGDRVTITCRASQSISTWLAWYQQKPGKAPKLLIYAASSLQSGVPSRFSGSGSGTDFTLTISSLQPEDFATYYCQQANAFPPTFGQGTRLEIK

SEQ ID NO: 597 - protein, 117 aa, Artificial Sequence
  Description of Artificial Sequence: Synthetic polypeptide
QVQLVQSGAEVKKPGSSVKVSCKASGGTFSSYAISWVRQAPGQGLEWMGWMEPHTGNTRYAQKFQGRVTITADESTSTAYMELSSLRSEDTAVYYCAKGGFSWFDPWGQGTLVTVSS

SEQ ID NO: 598 - protein, 113 aa, Artificial Sequence
  Description of Artificial Sequence: Synthetic polypeptide
DIVMTQSPDSLAVSLGERATINCKSSQSVLYSSNNKNYLAWYQQKPGQPPKLLIYWASTRESGVPDRFSGSGSGTDFTLTISSLQAEDVAVYYCQQYYSTPPTFGQGTRLEIK

SEQ ID NO: 599 - protein, 120 aa, Artificial Sequence
  Description of Artificial Sequence: Synthetic polypeptide
EVQLLESGGGLVKPGGSLRLSCAASGFTFDDYAMHWVRQAPGKGLEWVASITSSSAFIDYAASVKGRFTISRDDSKNTLYLQMNSLKTEDTAVYYCARERVDWNSYFDLWGRGTLVTVSS

SEQ ID NO: 600 - protein, 108 aa, Artificial Sequence
  Description of Artificial Sequence: Synthetic polypeptide
EIVMTQSPATLSVSPGERATLSCRASQGISNSYLAWYQQKPGQAPRLLIYGASTRATGIPARFSGSGSGTEFTLTISSLQSEDFAVYYCQQYYTYPPTFGPGTKVDIK

SEQ ID NO: 601 - protein, 16 aa, Artificial Sequence
  Description of Artificial Sequence: Synthetic peptide
CAKDLGVVVPAALDYW

SEQ ID NO: 602 - protein, 11 aa, Artificial Sequence
  Description of Artificial Sequence: Synthetic peptide
QASQDISNHLN

SEQ ID NO: 603 - protein, 5 aa, Artificial Sequence
  Description of Artificial Sequence: Synthetic peptide
SNLEA

SEQ ID NO: 604 - protein, 121 aa, Artificial Sequence
  Description of Artificial Sequence: Synthetic polypeptide
EVQLLESGGGLVQPGGSLRLSCAASGFTFDDYAMHWVRQAPGKGLEWVSAISGSGGSTYYADSVKGRFTISRDNSKNTLYLQMNSLRAEDTAVYYCAKDLGVVVPAALDYWGQGTTVTVSS

SEQ ID NO: 605 - protein, 107 aa, Artificial Sequence
  Description of Artificial Sequence: Synthetic polypeptide
DIQMTQSPSSLSASVGDRVTITCQASQDISNHLNWYQQKPGKAPKLLIYDASNLEAGVPSRFSGSGSGTDFTLTISSLQPEDFATYYCQQSYSTPLTFGGGTKVEIK

SEQ ID NO: 606 - protein, 119 aa, Artificial Sequence
  Description of Artificial Sequence: Synthetic polypeptide
EVQLLESGGGLVKPGGSLRLSCAASGFAFSSHWMHWVRQAPGKGLEWVAGTSGSGESRDYADFVKGRFTISRDDSKNTLYLQMNSLKTEDTAVYYCARETYYYYYMDVWGKGTTVTVSS

SEQ ID NO: 607 - protein, 107 aa, Artificial Sequence
  Description of Artificial Sequence: Synthetic polypeptide
DIQMTQSPSSLSASVGDRVTITCRASQGISNYLAWYQQKPGKAPKLLIYDAANLEGGVPSRFSGSGSGTDFTLTISSLQPEDFATYYCQQSDIFPPTFGQGTKVEIK

SEQ ID NO: 608 - protein, 119 aa, Artificial Sequence
  Description of Artificial Sequence: Synthetic polypeptide
QVQLVQSGAEVKKPGASVKVSCKASGYTFTRHWIHWVRQAPGQGLEWMGWINVKTGGAGYAQKFQGRVTMTRDTSTSTVYMELSSLRSEDTAVYYCARESSGWYGTDVWGQGTTVTVSS

SEQ ID NO: 609 - protein, 107 aa, Artificial Sequence
  Description of Artificial Sequence: Synthetic polypeptide
DIQMTQSPSSLSASVGDRATITCRASQSISNYLAWYQQKPGKAPKLLIYAASSLQSGVPSRFSGSGSGTDFTLTISSLQPEDFATYYCQQSNSFPLTFGGGTKVEIK

SEQ ID NO: 610 - protein, 120 aa, Artificial Sequence
  Description of Artificial Sequence: Synthetic polypeptide
EVQLLESGGGLVQPGGSLRLSCAASGFTFSSYWMHWVRQAPGKGLEWVAAISYDGKYKDYEDSVKGRFTISRDNSKNTLYLQMNSLRAEDTAVYYCARENKQWLASFDYWGQGTLVTVSS

SEQ ID NO: 611 - protein, 106 aa, Artificial Sequence
  Description of Artificial Sequence: Synthetic polypeptide
DIQMTQSPSSLSASVGDRVTITCQASQDISNFVNWYQQKPGKAPKLLIYAANLRSGVPSRFSGSGSGTDFTLTISSLQPEDFATYYCQQANSFPVTFGPGTKVDIK

SEQ ID NO: 612 - protein, 9 aa, Artificial Sequence
  Description of Artificial Sequence: Synthetic peptide
GTFSSSAIS

SEQ ID NO: 613 - protein, 13 aa, Artificial Sequence
  Description of Artificial Sequence: Synthetic peptide
GWISAYNGYTNYA

SEQ ID NO: 614 - protein, 16 aa, Artificial Sequence
  Description of Artificial Sequence: Synthetic peptide
CASRVHSGGSYPDDYW

SEQ ID NO: 615 - protein, 11 aa, Artificial Sequence
  Description of Artificial Sequence: Synthetic peptide
QASEHIYNYLN

SEQ ID NO: 616 - protein, 9 aa, Artificial Sequence
  Description of Artificial Sequence: Synthetic peptide
QQTDSIPIT

SEQ ID NO: 617 - protein, 121 aa, Artificial Sequence
  Description of Artificial Sequence: Synthetic polypeptide
QVQLVQSGAEVKKPGASVKVSCKASGGTFSSSAISWVRQAPGQGLEWMGWISAYNGYTNYAQKFQGRVTMTRDTSTSTVYMELSSLRSEDTAVYYCASRVHSGGSYPDDYWGQGTLVTVSS

SEQ ID NO: 618 - protein, 107 aa, Artificial Sequence
  Description of Artificial Sequence: Synthetic polypeptide
DIQMTQSPSSLSASVGDRVTITCQASEHIYNYLNWYQQKPGKAPKLLIYAASSLQSGVPSRFSGSGSGTDFTLTISSLQPEDFATYYCQQTDSIPITFGQGTKVEIK

SEQ ID NO: 619 - protein, 10 aa, Artificial Sequence
  Description of Artificial Sequence: Synthetic peptide
GGGGSGGGGS

SEQ ID NO: 620 - protein, 588 aa, Artificial Sequence
  Description of Artificial Sequence: Synthetic polypeptide
EVQLLESGGGLVQPGGSLRLSCAASGFTFNNYAFHWVRQAPGKGLEWVSRINSYGTSTTYADSVKGRFTISRDNSKNTLYLQMNSLRAEDTAVYYCAREGPVAGYWYFDLWGQGTLVTVSSASTKGPSVFPLAPSSKSTSGGTAALGCLVKDYFPEPVTVSWNSGALTSGVHTFPAVLQSSGLYSLSSVVTVPSSSLGTQTYICNVNHKPSNTKVDKKVEPKSCDKTHTCPPCPAPEAAGAPSVFLFPPKPKDTLMISRTPEVTCVVVDVSHEDPEVKFNWYVDGVEVHNAKTKPREEQYNSTYRVVSVLTVLHQDWLNGKEYKCKVSNKALPAPIEKTISKAKGQPREPQVYTLPPSREEMTKNQVSLTCLVKGFYPSDIAVEWESNGQPENNYKTTPPVLDSDGSFFLYSKLTVDKSRWQQGNVFSCSVMHEALHNHYTQKSLSLSPGGGGGSAPTSSSTKKTQLQLEHLLLDLQMILNGINNYKNPKLTRMLTFKFYMPKKATELKHLQCLEEELKPLEEALNLAPSKNFHLRPRDLISDINVIVLELKGSETTFMCEYADETATIVEFINRWITFSQSIISTLT

SEQ ID NO: 621 - protein, 215 aa, Artificial Sequence
  Description of Artificial Sequence: Synthetic polypeptide
DIQMTQSPSSLSASVGDRVTITCRASQIIGTNLAWYQQKPGKAPKLLIYGASSLQSGVPSRFSGSGSGTDFTLTISSLQPEDFATYYCQQSYRLPFTFGQGTKVEIKRRTVAAPSVFIFPPSDEQLKSGTASVVCLLNNFYPREAKVQWKVDNALQSGNSQESVTEQDSKDSTYSLSSTLTLSKADYEKHKVYACEVTHQGLSSPVTKSFNRGEC

SEQ ID NO: 622 - protein, 586 aa, Artificial Sequence
  Description of Artificial Sequence: Synthetic polypeptide
EVQLLESGGGLVQPGGSLRLSCAASGFTFSDFWMHWVRQAPGKGLEWISYISGDSGYTNYADSVKGRFTISRDNSKNTLYLQMNSLRAEDTAVYYCARDRPYYYYMDVWGKGTTVTVSSASTKGPSVFPLAPSSKSTSGGTAALGCLVKDYFPEPVTVSWNSGALTSGVHTFPAVLQSSGLYSLSSVVTVPSSSLGTQTYICNVNHKPSNTKVDKKVEPKSCDKTHTCPPCPAPEAAGAPSVFLFPPKPKDTLMISRTPEVTCVVVDVSHEDPEVKFNWYVDGVEVHNAKTKPREEQYNSTYRVVSVLTVLHQDWLNGKEYKCKVSNKALPAPIEKTISKAKGQPREPQVYTLPPSREEMTKNQVSLTCLVKGFYPSDIAVEWESNGQPENNYKTTPPVLDSDGSFFLYSKLTVDKSRWQQGNVFSCSVMHEALHNHYTQKSLSLSPGGGGGSAPTSSSTKKTQLQLEHLLLDLQMILNGINNYKNPKLTRMLTFKFYMPKKATELKHLQCLEEELKPLEEALNLAPSKNFHLRPRDLISDINVIVLELKGSETTFMCEYADETATIVEFINRWITFSQSIISTLT

SEQ ID NO: 623 - protein, 214 aa, Artificial Sequence
  Description of Artificial Sequence: Synthetic polypeptide
DIQMTQSPSSLSASVGDRVTITCRASQSVSRSLAWYQQKPGKAPKLLIYAASSLQSGVPSRFSGSGSGTDFTLTISSLQPEDFATYYCQQYKSYPVTFGQGTKVEIKRTVAAPSVFIFPPSDEQLKSGTASVVCLLNNFYPREAKVQWKVDNALQSGNSQESVTEQDSKDSTYSLSSTLTLSKADYEKHKVYACEVTHQGLSSPVTKSFNRGEC

SEQ ID NO: 624 - protein, 587 aa, Artificial Sequence
  Description of Artificial Sequence: Synthetic polypeptide
EVQLLESGGGLVKPGGSLRLSCAASGFTFDDYAMHWVRQAPGKGLEWVASITSSSAFIDYAASVKGRFTISRDDSKNTLYLQMNSLKTEDTAVYYCARERVDWNSYFDLWGRGTLVTVSSASTKGPSVFPLAPSSKSTSGGTAALGCLVKDYFPEPVTVSWNSGALTSGVHTFPAVLQSSGLYSLSSVVTVPSSSLGTQTYICNVNHKPSNTKVDKKVEPKSCDKTHTCPPCPAPEAAGAPSVFLFPPKPKDTLMISRTPEVTCVVVDVSHEDPEVKFNWYVDGVEVHNAKTKPREEQYNSTYRVVSVLTVLHQDWLNGKEYKCKVSNKALPAPIEKTISKAKGQPREPQVYTLPPSREEMTKNQVSLTCLVKGFYPSDIAVEWESNGQPENNYKTTPPVLDSDGSFFLYSKLTVDKSRWQQGNVFSCSVMHEALHNHYTQKSLSLSPGGGGGSAPTSSSTKKTQLQLEHLLLDLQMILNGINNYKNPKLTRMLTFKFYMPKKATELKHLQCLEEELKPLEEALNLAPSKNFHLRPRDLISDINVIVLELKGSETTFMCEYADETATIVEFINRWITFSQSIISTLT

SEQ ID NO: 625 - protein, 215 aa, Artificial Sequence
  Description of Artificial Sequence: Synthetic polypeptide
EIVMTQSPATLSVSPGERATLSCRASQGISNSYLAWYQQKPGQAPRLLIYGASTRATGIPARFSGSGSGTEFTLTISSLQSEDFAVYYCQQYYTYPPTFGPGTKVDIKRTVAAPSVFIFPPSDEQLKSGTASVVCLLNNFYPREAKVQWKVDNALQSGNSQESVTEQDSKDSTYSLSSTLTLSKADYEKHKVYACEVTHQGLSSPVTKSFNRGEC

SEQ ID NO: 626-628 - skipped (3 entries)

SEQ ID NO: 629 - protein, 14 aa, Artificial Sequence
  Description of Artificial Sequence: Synthetic peptide
VSRINSYGTSTTYA

SEQ ID NO: 630 - protein, 9 aa, Artificial Sequence
  Description of Artificial Sequence: Synthetic peptide
IYGASSLQS

SEQ ID NO: 631 - protein, 8 aa, Artificial Sequence
  Description of Artificial Sequence: Synthetic peptide
YGASSLQS

SEQ ID NO: 632 - protein, 9 aa, Artificial Sequence
  Description of Artificial Sequence: Synthetic peptide
QQSYRLPFT

SEQ ID NO: 633 - protein, 5 aa, Artificial Sequence
  Description of Artificial Sequence: Synthetic peptide
NYAFH

SEQ ID NO: 634 - protein, 17 aa, Artificial Sequence
  Description of Artificial Sequence: Synthetic peptide
RINSYGTSTTYADSVKG

SEQ ID NO: 635 - protein, 12 aa, Artificial Sequence
  Description of Artificial Sequence: Synthetic peptide
EGPVAGYWYFDL

SEQ ID NO: 636 - protein, 6 aa, Artificial Sequence
  Description of Artificial Sequence: Synthetic peptide
QIIGTN

SEQ ID NO: 637 - protein, 8 aa, Artificial Sequence
  Description of Artificial Sequence: Synthetic peptide
GFTFNNYA

SEQ ID NO: 638 - protein, 8 aa, Artificial Sequence
  Description of Artificial Sequence: Synthetic peptide
INSYGTST

SEQ ID NO: 639 - protein, 14 aa, Artificial Sequence
  Description of Artificial Sequence: Synthetic peptide
AREGPVAGYWYFDL

SEQ ID NO: 640 - protein, 7 aa, Artificial Sequence
  Description of Artificial Sequence: Synthetic peptide
GFTFNNY

SEQ ID NO: 641 - protein, 6 aa, Artificial Sequence
  Description of Artificial Sequence: Synthetic peptide
NSYGTS

SEQ ID NO: 642 - protein, 11 aa, Artificial Sequence [sequence omitted]

SEQ ID NO: 643 - protein, 5 aa, Artificial Sequence
  Description of Artificial Sequence: Synthetic peptide
DFWMH

SEQ ID NO: 644 - protein, 17 aa, Artificial Sequence
  Description of Artificial Sequence: Synthetic peptide
YISGDSGYTNYADSVKG

SEQ ID NO: 645 - protein, 10 aa, Artificial Sequence
  Description of Artificial Sequence: Synthetic peptide
DRPYYYYMDV

SEQ ID NO: 646 - protein, 6 aa, Artificial Sequence
  Description of Artificial Sequence: Synthetic peptide
QSVSRS

SEQ ID NO: 647 - protein, 8 aa, Artificial Sequence
  Description of Artificial Sequence: Synthetic peptide
GFTFSDFW

SEQ ID NO: 648 - protein, 8 aa, Artificial Sequence
  Description of Artificial Sequence: Synthetic peptide
ISGDSGYT

SEQ ID NO: 649 - protein, 12 aa, Artificial Sequence
  Description of Artificial Sequence: Synthetic peptide
ARDRPYYYYMDV

SEQ ID NO: 650 - protein, 7 aa, Artificial Sequence
  Description of Artificial Sequence: Synthetic peptide
GFTFSDF

SEQ ID NO: 651 - protein, 6 aa, Artificial Sequence
  Description of Artificial Sequence: Synthetic peptide
SGDSGY

SEQ ID NO: 652 - protein, 11 aa, Artificial Sequence [sequence omitted]

SEQ ID NO: 653 - protein, 5 aa, Artificial Sequence
  Description of Artificial Sequence: Synthetic peptide
DYAMH

SEQ ID NO: 654 - protein, 17 aa, Artificial Sequence
  Description of Artificial Sequence: Synthetic peptide
SITSSSAFIDYAASVKG

SEQ ID NO: 655 - protein, 11 aa, Artificial Sequence
  Description of Artificial Sequence: Synthetic peptide
ERVDWNSYFDL

SEQ ID NO: 656 - protein, 7 aa, Artificial Sequence
  Description of Artificial Sequence: Synthetic peptide
QGISNSY

SEQ ID NO: 657 - protein, 8 aa, Artificial Sequence
  Description of Artificial Sequence: Synthetic peptide
GFTFDDYA

SEQ ID NO: 658 - protein, 8 aa, Artificial Sequence
  Description of Artificial Sequence: Synthetic peptide
ITSSSAFI

SEQ ID NO: 659 - protein, 13 aa, Artificial Sequence
  Description of Artificial Sequence: Synthetic peptide
ARERVDWNSYFDL

SEQ ID NO: 660 - protein, 7 aa, Artificial Sequence
  Description of Artificial Sequence: Synthetic peptide
GFTFDDY

SEQ ID NO: 661 - protein, 6 aa, Artificial Sequence
  Description of Artificial Sequence: Synthetic peptide
TSSSAF

SEQ ID NO: 662-1345 - skipped (684 entries)

SEQ ID NO: 1346 - protein, 119 aa, Artificial Sequence
  Description of Artificial Sequence: Synthetic polypeptide
EVQLLESGGGLVQPGGSLRLSCAASGFTFSDFWMHWVRQAPGKGLEWISYISGDSGYTNYADSVKGRFTISRDNSKNTLYLQMNSLRAEDTAVYYCARDRPNYYYMDVWGKGTTVTVSS

SEQ ID NO: 1347 - skipped

SEQ ID NO: 1348 - protein, 119 aa, Artificial Sequence
  Description of Artificial Sequence: Synthetic polypeptide
EVQLLESGGGLVQPGGSLRLSCAASGFTFSDFWMHWVRQAPGKGLEWISYISGDSGYTNYADSVKGRFTISRDNSKNTLYLQMNSLRAEDTAVYYCARDRPQYYYMDVWGKGTTVTVSS

SEQ ID NO: 1349 - protein, 119 aa, Artificial Sequence
  Description of Artificial Sequence: Synthetic polypeptide
EVQLLESGGGLVQPGGSLRLSCAASGFTFSDFWMHWVRQAPGKGLEWISYISGDSGYTNYADSVKGRFTISRDNSKNTLYLQMNSLRAEDTAVYYCARDRPGYYYMDVWGKGTTVTVSS

SEQ ID NO: 1350 - protein, 119 aa, Artificial Sequence
  Description of Artificial Sequence: Synthetic polypeptide
EVQLLESGGGLVQPGGSLRLSCAASGFTFSDFWMHWVRQAPGKGLEWISYISGDSGYTNYADSVKGRFTISRDNSKNTLYLQMNSLRAEDTAVYYCARDRPYYYQMDVWGKGTTVTVSS

SEQ ID NO: 1351 - protein, 119 aa, Artificial Sequence
  Description of Artificial Sequence: Synthetic polypeptide
EVQLLESGGGLVQPGGSLRLSCAASGFTFSDFWMHWVRQAPGKGLEWISYISGDSGYTNYADSVKGRFTISRDNSKNTLYLQMNSLRAEDTAVYYCARDRPYYYGMDVWGKGTTVTVSS

SEQ ID NO: 1352 - protein, 119 aa, Artificial Sequence
  Description of Artificial Sequence: Synthetic polypeptide
EVQLLESGGGLVQPGGSLRLSCAASGFTFSNFWMHWVRQAPGKGLEWISYISGDSGYTNYADSVKGRFTISRDNSKNTLYLQMNSLRAEDTAVYYCARDRPYYYYMDVWGKGTTVTVSS

SEQ ID NO: 1353 - protein, 119 aa, Artificial Sequence
  Description of Artificial Sequence: Synthetic polypeptide
EVQLLESGGGLVQPGGSLRLSCAASGFTFSSFWMHWVRQAPGKGLEWISYISGDSGYTNYADSVKGRFTISRDNSKNTLYLQMNSLRAEDTAVYYCARDRPYYYYMDVWGKGTTVTVSS

SEQ ID NO: 1354 - protein, 119 aa, Artificial Sequence
  Description of Artificial Sequence: Synthetic polypeptide
EVQLLESGGGLVQPGGSLRLSCAASGFTFSAFWMHWVRQAPGKGLEWISYISGDSGYTNYADSVKGRFTISRDNSKNTLYLQMNSLRAEDTAVYYCARDRPYYYYMDVWGKGTTVTVSS

SEQ ID NO: 1355 - protein, 119 aa, Artificial Sequence
  Description of Artificial Sequence: Synthetic polypeptide
EVQLLESGGGLVQPGGSLRLSCAASGFTFSDFWMHWVRQAPGKGLEWISYISGDSGYTNYADSVKGRFTISRDNSNNTLYLQMNSLRAEDTAVYYCARDRPYYYYMDVWGKGTTVTVSS

SEQ ID NO: 1356 - protein, 119 aa, Artificial Sequence
  Description of Artificial Sequence: Synthetic polypeptide
EVQLLESGGGLVQPGGSLRLSCAASGFTFSSYAMSWVRQAPGKGLEWISYISGDSGYTNYADSVKGRFTISRDNSKNTLYLQMNSLRAEDTAVYYCARDRPYYYYMDVWGKGTTVTVSS

SEQ ID NO: 1357 - protein, 119 aa, Artificial Sequence
  Description of Artificial Sequence: Synthetic polypeptide
EVQLLESGGGLVQPGGSLRLSCAASGFTFSDFWMHWVRQAPGKGLEWVSAISGSGGSTYYADSVKGRFTISRDNSKNTLYLQMNSLRAEDTAVYYCARDRPYYYYMDVWGKGTTVTVSS

SEQ ID NO: 1358 - protein, 119 aa, Artificial Sequence
  Description of Artificial Sequence: Synthetic polypeptide
EVQLLESGGGLVQPGGSLRLSCAASGFTFSSYAMSWVRQAPGKGLEWVSAISGSGGSTYYADSVKGRFTISRDNSKNTLYLQMNSLRAEDTAVYYCARDRPYYYYMDVWGKGTTVTVSS

SEQ ID NO: 1359 - protein, 113 aa, Artificial Sequence
  Description of Artificial Sequence: Synthetic polypeptide
DIVMTQSPDSLAVSLGERATINCKSSQSVLYSPNNKNYLAWYQQKPGQPPKLLIYWASTRESGVPDRFSGSGSGTDFTLTISSLQAEDVAVYYCQQYYTTPPTFGQGTRLEIK

SEQ ID NO: 1360 - protein, 107 aa, Artificial Sequence
  Description of Artificial Sequence: Synthetic polypeptide
DIQMTQSPSSLSASVGDRVTITCRASQSISSYLNWYQQKPGKAPKLLIYAASSLQSGVPSRFSGSGSGTDFTLTISSLQPEDFATYYCQQSYSTPRTFGQGTKVEIK

SEQ ID NO: 1361 - protein, 107 aa, Artificial Sequence
  Description of Artificial Sequence: Synthetic polypeptide
DIQMTQSPSSLSASVGDRVTITCRASQSISSYLNWYQQKPGKAPKLLIYAASSLQSGVPSRFSGSGSGTDFTLTISSLQPEDFATYYCQQYKSYPVTFGQGTKVEIK

SEQ ID NO: 1362 - protein, 107 aa, Artificial Sequence
  Description of Artificial Sequence: Synthetic polypeptide
DIQMTQSPSSLSASVGDRVTITCRASQSVSRSLAWYQQKPGKAPKLLIYAASSLQSGVPSRFSGSGSGTDFTLTISSLQPEDFATYYCQQSYSTPRTFGQGTKVEIK

SEQ ID NO: 1363 - protein, 107 aa, Artificial Sequence
  Description of Artificial Sequence: Synthetic polypeptide
DIQMTQSPSSLSASVGDRVTITCRASQSISRSLAWYQQKPGKAPKLLIYAASSLQSGVPSRFSGSGSGTDFTLTISSLQPEDFATYYCQQYKSYPVTFGQGTKVEIK

SEQ ID NO: 1364 - protein, 107 aa, Artificial Sequence
  Description of Artificial Sequence: Synthetic polypeptide
DIQMTQSPSSLSASVGDRVTITCRASQSVSSSLAWYQQKPGKAPKLLIYAASSLQSGVPSRFSGSGSGTDFTLTISSLQPEDFATYYCQQYKSYPVTFGQGTKVEIK

SEQ ID NO: 1365 - protein, 107 aa, Artificial Sequence
  Description of Artificial Sequence: Synthetic polypeptide
DIQMTQSPSSLSASVGDRVTITCRASQSVSRYLAWYQQKPGKAPKLLIYAASSLQSGVPSRFSGSGSGTDFTLTISSLQPEDFATYYCQQYKSYPVTFGQGTKVEIK

SEQ ID NO: 1366 - protein, 107 aa, Artificial Sequence
  Description of Artificial Sequence: Synthetic polypeptide
DIQMTQSPSSLSASVGDRVTITCRASQSVSRSLNWYQQKPGKAPKLLIYAASSLQSGVPSRFSGSGSGTDFTLTISSLQPEDFATYYCQQYKSYPVTFGQGTKVEIK

SEQ ID NO: 1367 - protein, 107 aa, Artificial Sequence
  Description of Artificial Sequence: Synthetic polypeptide
DIQMTQSPSSLSASVGDRVTITCRASQSISSSLAWYQQKPGKAPKLLIYAASSLQSGVPSRFSGSGSGTDFTLTISSLQPEDFATYYCQQYKSYPVTFGQGTKVEIK

SEQ ID NO: 1368 - protein, 107 aa, Artificial Sequence
  Description of Artificial Sequence: Synthetic polypeptide
DIQMTQSPSSLSASVGDRVTITCRASQSISRYLAWYQQKPGKAPKLLIYAASSLQSGVPSRFSGSGSGTDFTLTISSLQPEDFATYYCQQYKSYPVTFGQGTKVEIK

SEQ ID NO: 1369 - protein, 107 aa, Artificial Sequence
  Description of Artificial Sequence: Synthetic polypeptide
DIQMTQSPSSLSASVGDRVTITCRASQSISRSLNWYQQKPGKAPKLLIYAASSLQSGVPSRFSGSGSGTDFTLTISSLQPEDFATYYCQQYKSYPVTFGQGTKVEIK

SEQ ID NO: 1370 - protein, 107 aa, Artificial Sequence
  Description of Artificial Sequence: Synthetic polypeptide
DIQMTQSPSSLSASVGDRVTITCRASQSVSSYLAWYQQKPGKAPKLLIYAASSLQSGVPSRFSGSGSGTDFTLTISSLQPEDFATYYCQQYKSYPVTFGQGTKVEIK

SEQ ID NO: 1371 - protein, 107 aa, Artificial Sequence
  Description of Artificial Sequence: Synthetic polypeptide
DIQMTQSPSSLSASVGDRVTITCRASQSVSSSLNWYQQKPGKAPKLLIYAASSLQSGVPSRFSGSGSGTDFTLTISSLQPEDFATYYCQQYKSYPVTFGQGTKVEIK

SEQ ID NO: 1372 - protein, 107 aa, Artificial Sequence
  Description of Artificial Sequence: Synthetic polypeptide
DIQMTQSPSSLSASVGDRVTITCRASQSVSRYLNWYQQKPGKAPKLLIYAASSLQSGVPSRFSGSGSGTDFTLTISSLQPEDFATYYCQQYKSYPVTFGQGTKVEIK

SEQ ID NO: 1373 - protein, 107 aa, Artificial Sequence
  Description of Artificial Sequence: Synthetic polypeptide
DIQMTQSPSSLSASVGDRVTITCRASQSISSSLNWYQQKPGKAPKLLIYAASSLQSGVPSRFSGSGSGTDFTLTISSLQPEDFATYYCQQYKSYPVTFGQGTKVEIK

SEQ ID NO: 1374 - protein, 107 aa, Artificial Sequence
  Description of Artificial Sequence: Synthetic polypeptide
DIQMTQSPSSLSASVGDRVTITCRASQSISRYLNWYQQKPGKAPKLLIYAASSLQSGVPSRFSGSGSGTDFTLTISSLQPEDFATYYCQQYKSYPVTFGQGTKVEIK

SEQ ID NO: 1375 - protein, 107 aa, Artificial Sequence
  Description of Artificial Sequence: Synthetic polypeptide
DIQMTQSPSSLSASVGDRVTITCRASQSISSYLAWYQQKPGKAPKLLIYAASSLQSGVPSRFSGSGSGTDFTLTISSLQPEDFATYYCQQYKSYPVTFGQGTKVEIK

SEQ ID NO: 1376 - protein, 107 aa, Artificial Sequence
  Description of Artificial Sequence: Synthetic polypeptide
DIQMTQSPSSLSASVGDRVTITCRASQSVSSYLNWYQQKPGKAPKLLIYAASSLQSGVPSRFSGSGSGTDFTLTISSLQPEDFATYYCQQYKSYPVTFGQGTKVEIK

SEQ ID NO: 1377 - protein, 119 aa, Artificial Sequence
  Description of Artificial Sequence: Synthetic polypeptide
EVQLLESGGGLVQPGGSLRLSCAASGFTFSDFWMHWVRQAPGKGLEWISYISGESGYTNYADSVKGRFTISRDNSKNTLYLQMNSLRAEDTAVYYCARDRPYYYYMDVWGKGTTVTVSS

SEQ ID NO: 1378 - protein, 119 aa, Artificial Sequence
  Description of Artificial Sequence: Synthetic polypeptide
EVQLLESGGGLVQPGGSLRLSCAASGFTFSDFWMHWVRQAPGKGLEWISYISGDSGYTQYADSVKGRFTISRDNSKNTLYLQMNSLRAEDTAVYYCARDRPYYYYMDVWGKGTTVTVSS

SEQ ID NO: 1379 - protein, 119 aa, Artificial Sequence
  Description of Artificial Sequence: Synthetic polypeptide
EVQLLESGGGLVQPGGSLRLSCAASGFTFSDFWMHWVRQAPGKGLEWISYISGDSGYTNYADSVKGRFTISRDQSKNTLYLQMNSLRAEDTAVYYCARDRPYYYYMDVWGKGTTVTVSS

SEQ ID NO: 1380 - protein, 107 aa, Artificial Sequence
  Description of Artificial Sequence: Synthetic polypeptide
DIQMTQSPSSLSASVGDRVTITCRASQSVSRSLGWYQQKPGKAPKLLIYAASSLQSGVPSRFSGSGSGTDFTLTISSLQPEDFATYYCQQYKSYPVTFGQGTKVEIK

SEQ ID NO: 1381 - protein, 107 aa, Artificial Sequence
  Description of Artificial Sequence: Synthetic polypeptide
DIQMTQSPSSLSASVGDRVTITCRASQSVSRSLDWYQQKPGKAPKLLIYAASSLQSGVPSRFSGSGSGTDFTLTISSLQPEDFATYYCQQYKSYPVTFGQGTKVEIK

SEQ ID NO: 1382 - protein, 107 aa, Artificial Sequence
  Description of Artificial Sequence: Synthetic polypeptide
DIQMTQSPSSLSASVGDRVTITCRASQSVSRSLTWYQQKPGKAPKLLIYAASSLQSGVPSRFSGSGSGTDFTLTISSLQPEDFATYYCQQYKSYPVTFGQGTKVEIK

SEQ ID NO: 1383 - protein, 107 aa, Artificial Sequence
  Description of Artificial Sequence: Synthetic polypeptide
DIQMTQSPSSLSASVGDRVTITCRASQSVSRSLSWYQQKPGKAPKLLIYAASSLQSGVPSRFSGSGSGTDFTLTISSLQPEDFATYYCQQYKSYPVTFGQGTKVEIK

SEQ ID NO: 1384 - protein, 107 aa, Artificial Sequence
  Description of Artificial Sequence: Synthetic polypeptide
DIQMTQSPSSLSASVGDRVTITCRASQSVSRSLEWYQQKPGKAPKLLIYAASSLQSGVPSRFSGSGSGTDFTLTISSLQPEDFATYYCQQYKSYPVTFGQGTKVEIK

SEQ ID NO: 1385 - protein, 107 aa, Artificial Sequence
  Description of Artificial Sequence: Synthetic polypeptide
DIQMTQSPSSLSASVGDRVTITCRASQSVSRSLKWYQQKPGKAPKLLIYAASSLQSGVPSRFSGSGSGTDFTLTISSLQPEDFATYYCQQYKSYPVTFGQGTKVEIK

SEQ ID NO: 1386 - protein, 107 aa, Artificial Sequence
  Description of Artificial Sequence: Synthetic polypeptide
DIQMTQSPSSLSASVGDRVTITCRASQSVSRSLLWYQQKPGKAPKLLIYAASSLQSGVPSRFSGSGSGTDFTLTISSLQPEDFATYYCQQYKSYPVTFGQGTKVEIK

SEQ ID NO: 1387 - protein, 119 aa, Artificial Sequence
  Description of Artificial Sequence: Synthetic polypeptide
EVQLLESGGGLVQPGGSLRLSCAASGFTFSDFWMHWVRQAPGKGLEWISYISGDSGYTNYADSVKGRFTISRDNSKNTLYLQMNSLRAEDTAVYYCARDRPYYYIMDVWGKGTTVTVSS

SEQ ID NO: 1388 - protein, 119 aa, Artificial Sequence
  Description of Artificial Sequence: Synthetic polypeptide
EVQLLESGGGLVQPGGSLRLSCAASGFTFSDFWMHWVRQAPGKGLEWISYISGDSGYTNYADSVKGRFTISRDNSKNTLYLQMNSLRAEDTAVYYCARDRPYYYWMDVWGKGTTVTVSS

SEQ ID NO: 1389 - protein, 119 aa, Artificial Sequence
  Description of Artificial Sequence: Synthetic polypeptide
EVQLLESGGGLVQPGGSLRLSCAASGFTFSDFWMHWVRQAPGKGLEWISYISGDSGYTNYADSVKGRFTISRDNSKNTLYLQMNSLRAEDTAVYYCARDRPSYYYMDVWGKGTTVTVSS

SEQ ID NO: 1390 - protein, 119 aa, Artificial Sequence
  Description of Artificial Sequence: Synthetic polypeptide
EVQLLESGGGLVQPGGSLRLSCAASGFTFSDFWMHWVRQAPGKGLEWISYISGDSGYTNYADSVKGRFTISRDNSKNTLYLQMNSLRAEDTAVYYCARDRPTYYYMDVWGKGTTVTVSS

SEQ ID NO: 1391 - protein, 119 aa, Artificial Sequence
  Description of Artificial Sequence: Synthetic polypeptide
EVQLLESGGGLVQPGGSLRLSCAASGFTFSDYWMHWVRQAPGKGLEWISYISGDSGYTNYADSVKGRFTISRDNSKNTLYLQMNSLRAEDTAVYYCARDRPYYYYMDVWGKGTTVTVSS

SEQ ID NO: 1392 - protein, 119 aa, Artificial Sequence
  Description of Artificial Sequence: Synthetic polypeptide
EVQLLESGGGLVQPGGSLRLSCAASGFTFSSYWMHWVRQAPGKGLEWISYISGDSGYTNYADSVKGRFTISRDNSKNTLYLQMNSLRAEDTAVYYCARDRPYYYYMDVWGKGTTVTVSS

SEQ ID NO: 1393 - protein, 119 aa, Artificial Sequence
  Description of Artificial Sequence: Synthetic polypeptide
EVQLLESGGGLVQPGGSLRLSCAASGFTFSDFWMHWVRQAPGKGLEWISAISGSSGSTYYADSVKGRFTISRDNSKNTLYLQMNSLRAEDTAVYYCARDRPYYYYMDVWGKGTTVTVSS

SEQ ID NO: 1394 - protein, 119 aa, Artificial Sequence
  Description of Artificial Sequence: Synthetic polypeptide
EVQLLESGGGLVQPGGSLRLSCAASGFTFSSYWMHWVRQAPGKGLEWISAISGSSGSTYYADSVKGRFTISRDNSKNTLYLQMNSLRAEDTAVYYCARDRPYYYYMDVWGKGTTVTVSS

SEQ ID NO: 1395 - protein, 119 aa, Artificial Sequence
  Description of Artificial Sequence: Synthetic polypeptide
EVQLLESGGGLVQPGGSLRLSCAASGFTFSSYWMHWVRQAPGKGLEWVSAISGSGGSTYYADSVKGRFTISRDNSKNTLYLQMNSLRAEDTAVYYCARDRPYYYYMDVWGKGTTVTVSS

SEQ ID NO: 1396 - protein, 119 aa, Artificial Sequence
  Description of Artificial Sequence: Synthetic polypeptide
EVQLLESGGGLVQPGGSLRLSCAASGFTFSSYWMHWVRQAPGKGLEWISYISGDSGYTNYADSVKGRFTISRDNSKNTLYLQMNSLRAEDTAVYYCARDRPYYYIMDVWGKGTTVTVSS

SEQ ID NO: 1397 - protein, 119 aa, Artificial Sequence
  Description of Artificial Sequence: Synthetic polypeptide
EVQLLESGGGLVQPGGSLRLSCAASGFTFSDFWMHWVRQAPGKGLEWVSAISGSGGSTYYADSVKGRFTISRDNSKNTLYLQMNSLRAEDTAVYYCARDRPYYYIMDVWGKGTTVTVSS

SEQ ID NO: 1398 - protein, 119 aa, Artificial Sequence
  Description of Artificial Sequence: Synthetic polypeptide
EVQLLESGGGLVQPGGSLRLSCAASGFTFSSYWMHWVRQAPGKGLEWVSAISGSGGSTYYADSVKGRFTISRDNSKNTLYLQMNSLRAEDTAVYYCARDRPYYYIMDVWGKGTTVTVSS

SEQ ID NO: 1399 - protein, 14 aa, Artificial Sequence
  Description of Artificial Sequence: Synthetic peptide
CARDRPNYYYMDVW

SEQ ID NO: 1400 - protein, 14 aa, Artificial Sequence
  Description of Artificial Sequence: Synthetic peptide
CARDRPQYYYMDVW

SEQ ID NO: 1401 - protein, 14 aa, Artificial Sequence
  Description of Artificial Sequence: Synthetic peptide
CARDRPGYYYMDVW

SEQ ID NO: 1402 - protein, 14 aa, Artificial Sequence
  Description of Artificial Sequence: Synthetic peptide
CARDRPYYYQMDVW

SEQ ID NO: 1403 - protein, 14 aa, Artificial Sequence [sequence omitted]

SEQ ID NO: 1404 - protein, 9 aa, Artificial Sequence
  Description of Artificial Sequence: Synthetic peptide
FTFSNFWMH

SEQ ID NO: 1405 - protein, 9 aa, Artificial Sequence
  Description of Artificial Sequence: Synthetic peptide
FTFSSFWMH

SEQ ID NO: 1406 - protein, 9 aa, Artificial Sequence
  Description of Artificial Sequence: Synthetic peptide
FTFSAFWMH

SEQ ID NO: 1407 - protein, 9 aa, Artificial Sequence
  Description of Artificial Sequence: Synthetic peptide
QQSYSTPRT

SEQ ID NO: 1408 - protein, 11 aa, Artificial Sequence
  Description of Artificial Sequence: Synthetic peptide
RASQSISRSLA

SEQ ID NO: 1409 - protein, 11 aa, Artificial Sequence
  Description of Artificial Sequence: Synthetic peptide
RASQSVSSSLA

SEQ ID NO: 1410 - protein, 11 aa, Artificial Sequence
  Description of Artificial Sequence: Synthetic peptide
RASQSVSRYLA

SEQ ID NO: 1411 - protein, 11 aa, Artificial Sequence
  Description of Artificial Sequence: Synthetic peptide
RASQSVSRSLN

SEQ ID NO: 1412 - protein, 11 aa, Artificial Sequence
  Description of Artificial Sequence: Synthetic peptide
RASQSISSSLA

SEQ ID NO: 1413 - protein, 11 aa, Artificial Sequence
  Description of Artificial Sequence: Synthetic peptide
RASQSISRYLA

SEQ ID NO: 1414 - protein, 11 aa, Artificial Sequence
  Description of Artificial Sequence: Synthetic peptide
RASQSISRSLN

SEQ ID NO: 1415 - protein, 11 aa, Artificial Sequence
  Description of Artificial Sequence: Synthetic peptide
RASQSVSSYLA

SEQ ID NO: 1416 - protein, 11 aa, Artificial Sequence
  Description of Artificial Sequence: Synthetic peptide
RASQSVSSSLN

SEQ ID NO: 1417 - protein, 11 aa, Artificial Sequence
  Description of Artificial Sequence: Synthetic peptide
RASQSVSRYLN

SEQ ID NO: 1418 - protein, 11 aa, Artificial Sequence
  Description of Artificial Sequence: Synthetic peptide
RASQSISSSLN

SEQ ID NO: 1419 - protein, 11 aa, Artificial Sequence
  Description of Artificial Sequence: Synthetic peptide
RASQSISRYLN

SEQ ID NO: 1420 - protein, 11 aa, Artificial Sequence
  Description of Artificial Sequence: Synthetic peptide
RASQSISSYLA

SEQ ID NO: 1421 - protein, 11 aa, Artificial Sequence
  Description of Artificial Sequence: Synthetic peptide
RASQSVSSYLN

SEQ ID NO: 1422 - protein, 13 aa, Artificial Sequence
  Description of Artificial Sequence: Synthetic peptide
SYISGESGYTNYA

SEQ ID NO: 1423 - protein, 13 aa, Artificial Sequence
  Description of Artificial Sequence: Synthetic peptide
SYISGDSGYTQYA

SEQ ID NO: 1424 - protein, 11 aa, Artificial Sequence
  Description of Artificial Sequence: Synthetic peptide
RASQSVSRSLG

SEQ ID NO: 1425 - protein, 11 aa, Artificial Sequence
  Description of Artificial Sequence: Synthetic peptide
RASQSVSRSLD

SEQ ID NO: 1426 - protein, 11 aa, Artificial Sequence
  Description of Artificial Sequence: Synthetic peptide
RASQSVSRSLT

SEQ ID NO: 1427 - protein, 11 aa, Artificial Sequence
  Description of Artificial Sequence: Synthetic peptide
RASQSVSRSLS

SEQ ID NO: 1428 - protein, 11 aa, Artificial Sequence
  Description of Artificial Sequence: Synthetic peptide
RASQSVSRSLE

SEQ ID NO: 1429 - protein, 11 aa, Artificial Sequence
  Description of Artificial Sequence: Synthetic peptide
RASQSVSRSLK

SEQ ID NO: 1430 - protein, 11 aa, Artificial Sequence
  Description of Artificial Sequence: Synthetic peptide
RASQSVSRSLL

SEQ ID NO: 1431 - protein, 14 aa, Artificial Sequence
  Description of Artificial Sequence: Synthetic peptide
CARDRPYYYIMDVW

SEQ ID NO: 1432 - protein, 14 aa, Artificial Sequence
  Description of Artificial Sequence: Synthetic peptide
CARDRPYYYWMDVW

SEQ ID NO: 1433 - protein, 14 aa, Artificial Sequence
  Description of Artificial Sequence: Synthetic peptide
CARDRPSYYYMDVW

SEQ ID NO: 1434 - protein, 14 aa, Artificial Sequence
  Description of Artificial Sequence: Synthetic peptide
CARDRPTYYYMDVW

SEQ ID NO: 1435 - protein, 9 aa, Artificial Sequence
  Description of Artificial Sequence: Synthetic peptide
FTFSDYWMH

SEQ ID NO: 1436 - protein, 13 aa, Artificial Sequence
  Description of Artificial Sequence: Synthetic peptide
SAISGSSGSTYYA

SEQ ID NO: 1437 - skipped

SEQ ID NO: 1438 - protein, 119 aa, Artificial Sequence
  Description of Artificial Sequence: Synthetic polypeptide
EVQLLESGGGLVQPGGSLRLSCAASGFTFSNSDMSWVRQAPGKGLEWVSGITISGGSTYYADSVKGRFTISRDNSKNTLYLQMNSLRAEDTAVYYCARGRGGSGWLDYWGQGTLVTVSS

SEQ ID NO: 1439-1442 - skipped (4 entries)

SEQ ID NO: 1443 - protein, 119 aa, Artificial Sequence
  Description of Artificial Sequence: Synthetic polypeptide
EVQLLESGGGLVQPGGSLRLSCAASGFTFSSYWMHWVRQAPGKGLEWVSYISGSGGYTNYADSVKGRFTISRDNSKNTLYLQMNSLRAEDTAVYYCARDRPYGYYMDVWGKGTTVTVSS

SEQ ID NO: 1444 - skipped

SEQ ID NO: 1445 - protein, 119 aa, Artificial Sequence
  Description of Artificial Sequence: Synthetic polypeptide
EVQLLESGGGLVQPGGSLRLSCAASGFTFSSYWMHWVRQAPGKGLEWVSYISGSGGYTNYADSVKGRFTISRDNSKNTLYLQMNSLRAEDTAVYYCARDRPYYYDMDVWGKGTTVTVSS

SEQ ID NO: 1446-1448 - skipped (3 entries)

SEQ ID NO: 1449 - protein, 107 aa, Artificial Sequence
  Description of Artificial Sequence: Synthetic polypeptide
DIQMTQSPSSLSASVGDRVTITCQASRDIKNYLAWYQQKPGKAPKLLIYAASSLQSGVPSRFSGSGSGTDFTLTISSLQPEDFATYYCQQSYSTPPTFGPGTKVDIK

SEQ ID NO: 1450-1475 - skipped (26 entries)

SEQ ID NO: 1476 - protein, 119 aa, Artificial Sequence
  Description of Artificial Sequence: Synthetic polypeptide
EVQLLESGGGLVQPGGSLRLSCAASGFTFSSYDMSWVRQAPGKGLEWVSGITISGGSTYYADSVKGRFTISRDNSKNTLYLQMNSLRAEDTAVYYCARGRGGSGWLDYWGQGTTVTVSS

SEQ ID NO: 1477 - protein, 119 aa, Artificial Sequence
  Description of Artificial Sequence: Synthetic polypeptide
EVQLLESGGGLVQPGGSLRLSCAASGFTFSSYWMHWVRQAPGKGLEWVSYISGSGGYTNYADSVKGRFTISRDNSKNTLYLQMNSLRAEDTAVYYCARDRPYYYDIDVWGKGTTVTVSS

SEQ ID NO: 1478 - protein, 113 aa, Artificial Sequence
  Description of Artificial Sequence: Synthetic polypeptide
EVQLVQSGAEVKKPGASVKVSCKASGYSFTSYYMHWVRQAPGQGLEWMGIINPSGGSTSYAQKFQGRVTMTRDTSTSTVYMELSSLRSEDTAVYYCASGWVYWGQGTLVTVSS

SEQ ID NO: 1479 - protein, 107 aa, Artificial Sequence
  Description of Artificial Sequence: Synthetic polypeptide
DIQMTQSPSSLSASVGDRVTITCRASQSISSYLAWYQQKPGKAPKLLIYAASSLQSGVPSRFSGSGSGTDFTLTISSLQPEDFATYYCQQSYSTPPTFGPGTKVDIK

SEQ ID NO: 1480 - protein, 119 aa, Artificial Sequence
  Description of Artificial Sequence: Synthetic polypeptide
EVQLLESGGGLVQPGGSLRLSCAASGFTFSSYWMHWVRQAPGKGLEWVSYISGSGGYTNYADSVKGRFTISRDNSKNTLYLQMNSLRAEDTAVYYCARDRPYYYDLDVWGKGTTVTVSS

SEQ ID NO: 1481-1496 - skipped (16 entries)

SEQ ID NO: 1497 - protein, 5 aa, Artificial Sequence
  Description of Artificial Sequence: Synthetic peptide
SSLQS

SEQ ID NO: 1498 - protein, 9 aa, Artificial Sequence
  Description of Artificial Sequence: Synthetic peptide
QQYKSYPVT

SEQ ID NO: 1499 - protein, 9 aa, Artificial Sequence
  Description of Artificial Sequence: Synthetic peptide
FTFSSYWMH

SEQ ID NO: 1500-1501 - skipped (2 entries)

SEQ ID NO: 1502 - protein, 11 aa, Artificial Sequence
  Description of Artificial Sequence: Synthetic peptide
RASQSISSSLA

SEQ ID NO: 1503-1505 - skipped (3 entries)

SEQ ID NO: 1506 - protein, 13 aa, Artificial Sequence
  Description of Artificial Sequence: Synthetic peptide
SYISGSGGYTNYA

SEQ ID NO: 1507 - protein, 14 aa, Artificial Sequence
  Description of Artificial Sequence: Synthetic peptide
CARDRPYYYDMDVW

SEQ ID NO: 1508-1530 - skipped (23 entries)

SEQ ID NO: 1531 - protein, 14 aa, Artificial Sequence
  Description of Artificial Sequence: Synthetic peptide
CARDRPYYYDIDVW

SEQ ID NO: 1532 - protein, 14 aa, Artificial Sequence
  Description of Artificial Sequence: Synthetic peptide
CARDRPYYYDLDVW

SEQ ID NO: 1533-1541 - skipped (9 entries)

SEQ ID NO: 1542 - protein, 119 aa, Artificial Sequence
  Description of Artificial Sequence: Synthetic polypeptide
EVQLLESGGGLVQPGGSLRLSCAASGFTFSSYWMHWVRQAPGKCLEWVSYISGSGGYTNYADSVKGRFTISRDNSKNTLYLQMNSLRAEDTAVYYCARDRPYYYDMDVWGKGTTVTVSS

SEQ ID NO: 1543 - protein, 107 aa, Artificial Sequence
  Description of Artificial Sequence: Synthetic polypeptide
DIQMTQSPSSLSASVGDRVTITCRASQSISSSLAWYQQKPGKAPKLLIYAASSLQSGVPSRFSGSGSGTDFTLTISSLQPEDFATYYCQQYKSYPVTFGCGTKVEIK

SEQ ID NO: 1544 - protein, 119 aa, Artificial Sequence
  Description of Artificial Sequence: Synthetic polypeptide
EVQLLESGGGLVQPGGSLRLSCAASGFTFSSYWMHWVRQAPGKCLEWVSYISGSGGYTNYADSVKGRFTISRDNSKNTLYLQMNSLRAEDTAVYYCARDRPYYYDIDVWGKGTTVTVSS

SEQ ID NO: 1545 - protein, 119 aa, Artificial Sequence
  Description of Artificial Sequence: Synthetic polypeptide
EVQLLESGGGLVQPGGSLRLSCAASGFTFSSYWMHWVRQAPGKCLEWVSYISGSGGYTNYADSVKGRFTISRDNSKNTLYLQMNSLRAEDTAVYYCARDRPYYYDLDVWGKGTTVTVSS

SEQ ID NO: 1546 - protein, 15 aa, Artificial Sequence
  Description of Artificial Sequence: Synthetic peptide
GGGSEGGGSEGGGSE

SEQ ID NO: 1547 - protein, 119 aa, Artificial Sequence
  Description of Artificial Sequence: Synthetic polypeptide
EVQLLESGGGLVQPGGSLRLSCAASGFTFSSYDMSWVRQAPGKGLEWVSGITISGGSTYYHDSVKGRFTISRDNSKNTLYLQMNSLRAEDTAVYYCARGRGGSGWLDYWGQGTTVTVSS

SEQ ID NO: 1548 - protein, 119 aa, Artificial Sequence
  Description of Artificial Sequence: Synthetic polypeptide
EVQLLESGGGLVQPGGSLRLSCAASGFTFSSYAMSWVRQAPGKGLEWVSGISGSGGSTYYADSVKGRFTISRDNSKNTLYLQMNSLRAEDTAVYYCARGRGGSGWLDYWGQGTTVTVSS

SEQ ID NO: 1549 - protein, 119 aa, Artificial Sequence
  Description of Artificial Sequence: Synthetic polypeptide
EVQLLESGGGLVQPGGSLRLSCAASGFTFSSYSMSWVRQAPGKGLEWVSAISGSGGSTYYADSVKGRFTISRDNSKNTLYLQMNSLRAEDTAVYYCARGRGGSGWLDYWGQGTTVTVSS

SEQ ID NO: 1550 - protein, 119 aa, Artificial Sequence
  Description of Artificial Sequence: Synthetic polypeptide
EVQLLESGGGLVQPGGSLRLSCAASGFTFSSYSMSWVRQAPGKGLEWVSGISGSGGSTYYADSVKGRFTISRDNSKNTLYLQMNSLRAEDTAVYYCARGRGGSGWLDYWGQGTTVTVSS

SEQ ID NO: 1551 - protein, 119 aa, Artificial Sequence
  Description of Artificial Sequence: Synthetic polypeptide
EVQLLESGGGLVQPGGSLRLSCAASGFTFSSYDMSWVRQAPGKGLEWVSAISGSGGSTYYADSVKGRFTISRDNSKNTLYLQMNSLRAEDTAVYYCARGRGGSGWLDYWGQGTTVTVSS

SEQ ID NO: 1552 - protein, 119 aa, Artificial Sequence
  Description of Artificial Sequence: Synthetic polypeptide
EVQLLESGGGLVQPGGSLRLSCAASGFTFSSYDMSWVRQAPGKGLEWVSGITISGQSTYYADSVKGRFTISRDNSKNTLYLQMNSLRAEDTAVYYCARGRGGSGWLDYWGQGTTVTVSS

SEQ ID NO: 1553 - protein, 119 aa, Artificial Sequence
  Description of Artificial Sequence: Synthetic polypeptide
EVQLLESGGGLVQPGGSLRLSCAASGFTFSSYDMSWVRQAPGKGLEWVSGITISGWSTYYADSVKGRFTISRDNSKNTLYLQMNSLRAEDTAVYYCARGRGGSGWLDYWGQGTTVTVSS

SEQ ID NO: 1554 - protein, 119 aa, Artificial Sequence
  Description of Artificial Sequence: Synthetic polypeptide
EVQLLESGGGLVQPGGSLRLSCAASGFTFSSYDMSWVRQAPGKGLEWVSGITISGGSTYYADSVKGRFTISRDNSKNTLYLQMNSLRAEDTAVYYCARGRGGSGWFDYWGQGTTVTVSS

SEQ ID NO: 1555 - protein, 119 aa, Artificial Sequence
  Description of Artificial Sequence: Synthetic polypeptide
EVQLLESGGGLVQPGGSLRLSCAASGFTFSSYDMSWVRQAPGKGLEWVSGITISGGSTYYADSVKGRFTISRDNSKNTLYLQMNSLRAEDTAVYYCARGRGGSGWLDYWGKGTTVTVSS

SEQ ID NO: 1556 - protein, 119 aa, Artificial Sequence
  Description of Artificial Sequence: Synthetic polypeptide
EVQLLESGGGLVQPGGSLRLSCAASGFTFSYYDMSWVRQAPGKGLEWVSGITISGGSTYYADSVKGRFTISRDNSKNTLYLQMNSLRAEDTAVYYCARGRGGSGWLDYWGQGTTVTVSS

SEQ ID NO: 1557 - protein, 119 aa, Artificial Sequence
  Description of Artificial Sequence: Synthetic polypeptide
EVQLLESGGGLVQPGGSLRLSCAASGFTFSSYDMSWVRQAPGKGLEWVSGITISGGDTYYADSVKGRFTISRDNSKNTLYLQMNSLRAEDTAVYYCARGRGGSGWLDYWGQGTTVTVSS

SEQ ID NO: 1558 - protein, 119 aa, Artificial Sequence
  Description of Artificial Sequence: Synthetic polypeptide
EVQLLESGGGLVQPGGSLRLSCAASGFTFSSYDMSWVRQAPGKGLEWVSGITISGGNTYYADSVKGRFTISRDNSKNTLYLQMNSLRAEDTAVYYCARGRGGSGWLDYWGQGTTVTVSS

SEQ ID NO: 1559 - protein, 119 aa, Artificial Sequence
  Description of Artificial Sequence: Synthetic polypeptide
EVQLLESGGGLVQPGGSLRLSCAASGFPFSSYDMSWVRQAPGKGLEWVSGITISGGSTYYADSVKGRFTISRDNSKNTLYLQMNSLRAEDTAVYYCARGRGGSGWLDYWGQGTTVTVSS

SEQ ID NO: 1560 - protein, 113 aa, Artificial Sequence
  Description of Artificial Sequence: Synthetic polypeptide
DIVMTQSPDSLAVSLGERATINCKSSQSVLYSPNNKNYLAWYQQKPGQPPKLLIYWASTRFSGVPDRFSGSGSGTDFTLTISSLQAEDVAVYYCQQYYTTPPTFGQGTRLEIK

SEQ ID NO: 1561 - protein, 113 aa, Artificial Sequence
  Description of Artificial Sequence: Synthetic polypeptide
DIVMTQSPDSLAVSLGERATINCKSSQSVLYSPNNKNYLAWYQQKPGQPPKLLIYWASTRKSGVPDRFSGSGSGTDFTLTISSLQAEDVAVYYCQQYYTTPPTFGQGTRLEIK

SEQ ID NO: 1562 - protein, 113 aa, Artificial Sequence
  Description of Artificial Sequence: Synthetic polypeptide
DIVMTQSPDSLAVSLGERATINCKSSQSVLYSPNNKNYLAWYQQKPGQPPKLLIYWASTRESGVPDRFSGSGSGTDFTLTISSLQAEDVAVYYCQQYYTTPPTWGQGTRLEIK

SEQ ID NO: 1563 - protein, 113 aa, Artificial Sequence
  Description of Artificial Sequence: Synthetic polypeptide
DIVMTQSPDSLAVSLGERATINCKSSQSVLYSPHNKNYLAWYQQKPGQPPKLLIYWASTRESGVPDRFSGSGSGTDFTLTISSLQAEDVAVYYCQQYYTTPPTFGQGTRLEIK

SEQ ID NO: 1564 - protein, 113 aa, Artificial Sequence
  Description of Artificial Sequence: Synthetic polypeptide
DIVMTQSPDSLAVSLGERATINCKSSYSVLYSPNNKNYLAWYQQKPGQPPKLLIYWASTRESGVPDRFSGSGSGTDFTLTISSLQAEDVAVYYCQQYYTTPPTFGQGTRLEIK

SEQ ID NO: 1565 - protein, 113 aa, Artificial Sequence
  Description of Artificial Sequence: Synthetic polypeptide
DIVMTQSPDSLAVSLGERATINCKSSQSVLYSPNNKNYLAWYQQKPGQPPKLLIYWASTRESGVPDRFSGSGSGTDFTLTISSLQAEDVAVYYCQQYYLTPPTFGQGTRLEIK

SEQ ID NO: 1566 - protein, 113 aa, Artificial Sequence
  Description of Artificial Sequence: Synthetic polypeptide
DIVMTQSPDSLAVSLGERATINCKSSQSVLYSPNNKNYLAWYQQKPGQPPKLLIYWASTRESGVPDRFSGSGSGTDFTLTISSLQAEDVAVYYCQQYYTQPPTFGQGTRLEIK

SEQ ID NO: 1567 - protein, 113 aa, Artificial Sequence
  Description of Artificial Sequence: Synthetic polypeptide
DIVMTQSPDSLAVSLGERATINCKSSQSVLYSPNNKNYLAWYQQKPGQPPKLLIYWASTRFSGVPDRFSGSGSGTDFTLTISSLQAEDVAVYYCQQYYTTPPTWGQGTRLEIK

SEQ ID NO: 1568 - protein, 119 aa, Artificial Sequence
  Description of Artificial Sequence: Synthetic polypeptide
EVQLLESGGGLVQPGGSLRLSCAASGFTFSSYKMSWVRQAPGKGLEWVSGITISGGATYYADSVKGRFTISRDNSKNTLYLQMNSLRAEDTAVYYCARGAGGSGFLDYWGQGTTVTVSS

SEQ ID NO: 1569 - protein, 119 aa, Artificial Sequence
  Description of Artificial Sequence: Synthetic polypeptide
EVQLLESGGGLVQPGGSLRLSCAASGFTFSSYAMSWVRQAPGKGLEWVSGITISGGSTYYADSVKGRFTISRDNSKNTLYLQMNSLRAEDTAVYYCARGRGGSGFLDYWGQGTTVTVSS

SEQ ID NO: 1570 - protein, 119 aa, Artificial Sequence
  Description of Artificial Sequence: Synthetic polypeptide
EVQLLESGGGLVQPGGSLRLSCAASGFTFSSYRMSWVRQAPGKGLEWVSGITISGGSTYYADSVKGRFTISRDNSKNTLYLQMNSLRAEDTAVYYCARGRGGSGWLDYWGQGTTVTVSS

SEQ ID NO: 1571 - protein, 119 aa, Artificial Sequence
  Description of Artificial Sequence: Synthetic polypeptide
EVQLLESGGGLVQPGGSLRLSCAASGFTFSSYNMSWVRQAPGKGLEWVSGITISGGSTYYADSVKGRFTISRDNSKNTLYLQMNSLRAEDTAVYYCARGRGGSGWLDYWGQGTTVTVSS

SEQ ID NO: 1572 - protein, 119 aa, Artificial Sequence
  Description of Artificial Sequence: Synthetic polypeptide
EVQLLESGGGLVQPGGSLRLSCAASGFTFSSYQMSWVRQAPGKGLEWVSGITISGGSTYYADSVKGRFTISRDNSKNTLYLQMNSLRAEDTAVYYCARGRGGSGWLDYWGQGTTVTVSS

SEQ ID NO: 1573 - protein, 119 aa, Artificial Sequence
  Description of Artificial Sequence: Synthetic polypeptide
EVQLLESGGGLVQPGGSLRLSCAASGFTFSSYWMSWVRQAPGKGLEWVSGITISGGSTYYADSVKGRFTISRDNSKNTLYLQMNSLRAEDTAVYYCARGRGGSGWLDYWGQGTTVTVSS

SEQ ID NO: 1574 - protein, 119 aa, Artificial Sequence
  Description of Artificial Sequence: Synthetic polypeptide
EVQLLESGGGLVQPGGSLRLSCAASGFTFSNSAMSWVRQAPGKGLEWVSGITISGGSTYYADSVKGRFTISRDNSKNTLYLQMNSLRAEDTAVYYCARGRGGSGWLDYWGQGTLVTVSS

SEQ ID NO: 1575 - protein, 113 aa, Artificial Sequence
  Description of Artificial Sequence: Synthetic polypeptide
DIVMTQSPDSLAVSLGERATINCKSSQSVLYSPNNKNYLAWYQQKPGQPPKLLIYWASTRESGVPDRFSGSGSGTDFTLTISSLQAEDVAVYYCQQGYTTPPTFGQGTRLEIK

SEQ ID NO: 1576 - protein, 113 aa, Artificial Sequence
  Description of Artificial Sequence: Synthetic polypeptide
DIVMTQSPDSLAVSLGERATINCKSSQSVLYSPNNKNYLAWYQQKPGQPPKLLIYWASTRESGVPDRFSGSGSGTDFTLTISSLQAEDVAVYYCQQAYTTPPTFGQGTRLEIK

SEQ ID NO: 1577 - protein, 113 aa, Artificial Sequence
  Description of Artificial Sequence: Synthetic polypeptide
DIVMTQSPDSLAVSLGERATINCKSSQSVLYSPNNKNYLAWYQQKPGQPPKLLIYWASTRESGVPDRFSGSGSGTDFTLTISSLQAEDVAVYYCQQMYTTPPTFGQGTRLEIK

SEQ ID NO: 1578 - protein, 113 aa, Artificial Sequence
  Description of Artificial Sequence: Synthetic polypeptide
DIVMTQSPDSLAVSLGERATINCKSSQSVLYSPNNKNYLAWYQQKPGQPPKLLIYWASTRESGVPDRFSGSGSGTDFTLTISSLQAEDVAVYYCQQTYTTPPTFGQGTRLEIK

SEQ ID NO: 1579 - protein, 113 aa, Artificial Sequence
  Description of Artificial Sequence: Synthetic polypeptide
DIVMTQSPDSLAVSLGERATINCKSSQSVLYSPNNKNYLAWYQQKPGQPPKLLIYWASTRESGVPDRFSGSGSGTDFTLTISSLQAEDVAVYYCQQVYTTPPTFGQGTRLEIK

SEQ ID NO: 1580 - protein, 119 aa, Artificial Sequence
  Description of Artificial Sequence: Synthetic polypeptide
EVQLLESGGGLVQPGGSLRLSCAASGFTFSSYAMSWVRQAPGKGLEWVSGITIQGGSTYYADSVKGRFTISRDNSKNTLYLQMNSLRAEDTAVYYCARGRGGSGWLDYWGQGTTVTVSS

SEQ ID NO: 1581 - protein, 119 aa, Artificial Sequence
  Description of Artificial Sequence: Synthetic polypeptide
EVQLLESGGGLVQPGGSLRLSCAASGFTFSSYAMSWVRQAPGKGLEWVSGITISGGSTYYADSVKGRFTISRDNSKNTLYLQMNSLRAEDTAVYYCARGRGGAGWLDYWGQGTTVTVSS

SEQ ID NO: 1582 - protein, 113 aa, Artificial Sequence
  Description of Artificial Sequence: Synthetic polypeptide
DIVMTQSPDSLAVSLGERATINCKSSQSVLYSPNNKNYLAWYQQKPGQPPKLLIYWASTRESGVPDRFSGSGSGTDFTLTISSLQAEDVAVYYCQQYYTGPPTFGQGTRLEIK

SEQ ID NO: 1583 - protein, 113 aa, Artificial Sequence
  Description of Artificial Sequence: Synthetic polypeptide
QVQLVQSGAEVKKPGASVKVSCKASGYSFTTYYMHWVRQAPGQGLEWMGIINPSGGSTSYAQKFQGRVTMTRDTSTSTVYMELSSLRSEDTAVYYCASGWVYWGQGTLVTVSS

SEQ ID NO: 1584 - protein, 113 aa, Artificial Sequence
  Description of Artificial Sequence: Synthetic polypeptide
QVQLVQSGAEVKKPGASVKVSCKASGYSFTTYYMHWVRQAPGQGLEWMGIIQPSGGSTSYAQKFQGRVTMTRDTSTSTVYMELSSLRSEDTAVYYCASGWVYWGQGTLVTVSS

SEQ ID NO: 1585 - protein, 113 aa, Artificial Sequence
  Description of Artificial Sequence: Synthetic polypeptide
QVQLVQSGAEVKKPGASVKVSCKASGYTFTTYYMHWVRQAPGQGLEWMGIIAPSGGSTSYAQKFQGRVTMTRDTSTSTVYMELSSLRSEDTAVYYCASGWVYWGQGTLVTVSS

SEQ ID NO: 1586 - protein, 113 aa, Artificial Sequence
  Description of Artificial Sequence: Synthetic polypeptide
QVQLVQSGAEVKKPGASVKVSCKASGYSFTSYYMHWVRQAPGQGLEWMGIIAPSGGSTSYAQKFQGRVTMTRDTSTSTVYMELSSLRSEDTAVYYCASGWVYWGQGTLVTVSS

SEQ ID NO: 1587 - protein, 113 aa, Artificial Sequence
  Description of Artificial Sequence: Synthetic polypeptide
QVQLVQSGAEVKKPGASVKVSCKASGYTFTSYYMHWVRQAPGQGLEWMGIIAPSGGSTSYAQKFQGRVTMTRDTSTSTVYMELSSLRSEDTAVYYCASGWVYWGQGTLVTVSS

SEQ ID NO: 1588 - protein, 113 aa, Artificial Sequence
  Description of Artificial Sequence: Synthetic polypeptide
QVQLVQSGAEVKKPGASVKVSCKASGYSFTTYYMHWVRQAPGQGLEWMGIIAPSGGSTSYAQKFQGRVTMTRDTSTSTVYMELSSLRSEDTAVYYCASGWVYWGQGTLVTVSS

SEQ ID NO: 1589 - protein, 107 aa, Artificial Sequence
  Description of Artificial Sequence: Synthetic polypeptide
DIQMTQSPSSLSASVGDRVTITCRASRDIKNYLAWYQQKPGKAPKLLIYAASSLQSGVPSRFSGSGSGTDFTLTISSLQPEDFATYYCQQSYSTPPTFGPGTKVDIK

SEQ ID NO: 1590 - protein, 107 aa, Artificial Sequence
  Description of Artificial Sequence: Synthetic polypeptide
DIQMTQSPSSLSASVGDRVTITCQASQDIKNYLAWYQQKPGKAPKLLIYAASSLQSGVPSRFSGSGSGTDFTLTISSLQPEDFATYYCQQSYSTPPTFGPGTKVDIK

SEQ ID NO: 1591 - protein, 107 aa, Artificial Sequence
  Description of Artificial Sequence: Synthetic polypeptide
DIQMTQSPSSLSASVGDRVTITCQASRSIKNYLAWYQQKPGKAPKLLIYAASSLQSGVPSRFSGSGSGTDFTLTISSLQPEDFATYYCQQSYSTPPTFGPGTKVDIK

SEQ ID NO: 1592 - protein, 107 aa, Artificial Sequence
  Description of Artificial Sequence: Synthetic polypeptide
DIQMTQSPSSLSASVGDRVTITCQASRDISNYLAWYQQKPGKAPKLLIYAASSLQSGVPSRFSGSGSGTDFTLTISSLQPEDFATYYCQQSYSTPPTFGPGTKVDIK

SEQ ID NO: 1593 - protein, 107 aa, Artificial Sequence
  Description of Artificial Sequence: Synthetic polypeptide
DIQMTQSPSSLSASVGDRVTITCQASRDIKSYLAWYQQKPGKAPKLLIYAASSLQSGVPSRFSGSGSGTDFTLTISSLQPEDFATYYCQQSYSTPPTFGPGTKVDIK

SEQ ID NO: 1594 - protein, 107 aa, Artificial Sequence
  Description of Artificial Sequence: Synthetic polypeptide
DIQMTQSPSSLSASVGDRVTITCQASRDIKNYLNWYQQKPGKAPKLLIYAASSLQSGVPSRFSGSGSGTDFTLTISSLQPEDFATYYCQQSYSTPPTFGPGTKVDIK

SEQ ID NO: 1595 - protein, 107 aa, Artificial Sequence
  Description of Artificial Sequence: Synthetic polypeptide
DIQMTQSPSSLSASVGDRVTITCQASRDIKNYLAWYQQKPGKAPKLLIYAASSLQSGVPSRFSGSGSGTDFTLTISSLQPEDFATYYCQQSYSTPRTFGPGTKVDIK

SEQ ID NO: 1596 - protein, 107 aa, Artificial Sequence
  Description of Artificial Sequence: Synthetic polypeptide
DIQMTQSPSSLSASVGDRVTITCRASQSISSYLNWYQQKPGKAPKLLIYAASSLQSGVPSRFSGSGSGTDFTLTISSLQPEDFATYYCQQSYSTPRTFGPGTKVDIK

SEQ ID NO: 1597 - protein, 113 aa, Artificial Sequence
  Description of Artificial Sequence: Synthetic polypeptide
EVQLVQSGAEVKKPGASVKVSCKASGYSFTSYYMHWVRQAPGQGLEWMGAINPSGGSTSYAQKFQGRVTMTRDTSTSTVYMELSSLRSEDTAVYYCASGWVYWGQGTLVTVSS

SEQ ID NO: 1598 - protein, 113 aa, Artificial Sequence
  Description of Artificial Sequence: Synthetic polypeptide
EVQLVQSGAEVKKPGASVKVSCKASGYSFTSYYMHWVRQAPGQGLEWMGIINPSGGSTSYAQKFQGRVTMTRDTSTSTVYMELSSLNSEDTAVYYCASGWVYWGQGTLVTVSS

SEQ ID NO: 1599 - protein, 107 aa, Artificial Sequence
  Description of Artificial Sequence: Synthetic polypeptide
DIQMTQSPSSLSASVGDRVTITCRASQSILSYLAWYQQKPGKAPKLLIYAASSLQSGVPSRFSGSGSGTDFTLTISSLQPEDFATYYCQQSYSTPPTFGPGTKVDIK

SEQ ID NO: 1600 - protein, 107 aa, Artificial Sequence
  Description of Artificial Sequence: Synthetic polypeptide
DIQMTQSPSSLSASVGDRVTITCRASQSINSYLAWYQQKPGKAPKLLIYAASSLQSGVPSRFSGSGSGTDFTLTISSLQPEDFATYYCQQSYSTPPTFGPGTKVDIK

SEQ ID NO: 1601 - protein, 107 aa, Artificial Sequence
  Description of Artificial Sequence: Synthetic polypeptide
DIQMTQSPSSLSASVGDRVTITCRASQSISSYLAWYQQKPGAAPKLLIYAASSLQSGVPSRFSGSGSGTDFTLTISSLQPEDFATYYCQQSYSTPPTFGPGTKVDIK

SEQ ID NO: 1602 - protein, 107 aa, Artificial Sequence
  Description of Artificial Sequence: Synthetic polypeptide
DIQMTQSPSSLSASVGDRVTITCRASQSISSYLAWYQQKPGNAPKLLIYAASSLQSGVPSRFSGSGSGTDFTLTISSLQPEDFATYYCQQSYSTPPTFGPGTKVDIK

SEQ ID NO: 1603 - protein, 107 aa, Artificial Sequence
  Description of Artificial Sequence: Synthetic polypeptide
DIQMTQSPSSLSASVGDRVTITCRASQSISSYLAWYQQKPGSAPKLLIYAASSLQSGVPSRFSGSGSGTDFTLTISSLQPEDFATYYCQQSYSTPPTFGPGTKVDIK

SEQ ID NO: 1604 - protein, 107 aa, Artificial Sequence
  Description of Artificial Sequence: Synthetic polypeptide
DIQMTQSPSSLSASVGDTVTITCRASQSISSYLAWYQQKPGKAPKLLIYAASSLQSGVPSRFSGSGSGTDFTLTISSLQPEDFATYYCQQSYSTPPTFGPGTKVDIK

SEQ ID NO: 1605 - protein, 107 aa, Artificial Sequence
  Description of Artificial Sequence: Synthetic polypeptide
DIQMTQSPSSLSASVGDRVTITCRASQSISSYLAWYQQKPGKAPKLLIAAASSLQSGVPSRFSGSGSGTDFTLTISSLQPEDFATYYCQQSYSTPPTFGPGTKVDIK

SEQ ID NO: 1606 - protein, 114 aa, Artificial Sequence
  Description of Artificial Sequence: Synthetic polypeptide
EVQLLESGGGLVQPGGSLRLSCAASGYSFTTYYMHWWVRQAPGKGLEWMGIINPSGGSTSYADSVKGRFTISRDNSKNTLYLQMNSLRAEDTAVYYCASGWVYWGQGTTVTVSS

SEQ ID NO: 1607 - protein, 107 aa, Artificial Sequence
  Description of Artificial Sequence: Synthetic polypeptide
DIVMTQSPDSLAVSLGERATINCQASRDIKNYLAWYQQKPGQPPKLLIYAASSLQSGVPDRFSGSGSGTDFTLTISSLQAEDVAVYYCQQSYSTPPTFGQGTRLEIK

SEQ ID NO: 1608 - protein, 119 aa, Artificial Sequence
  Description of Artificial Sequence: Synthetic polypeptide
EVQLLESGGGLVQPGGSLRLSCAASGFTFSSSDMSWVRQAPGKGLEWVSGITISGGSTYYADSVKGRFTISRDNSKNTLYLQMNSLRAEDTAVYYCARGRGGSGWLDYWGQGTLVTVSS

SEQ ID NO: 1609 - protein, 119 aa, Artificial Sequence
  Description of Artificial Sequence: Synthetic polypeptide
EVQLLESGGGLVQPGGSLRLSCAASGFTFSNYDMSWVRQAPGKGLEWVSGITISGGSTYYADSVKGRFTISRDNSKNTLYLQMNSLRAEDTAVYYCARGRGGSGWLDYWGQGTLVTVSS

SEQ ID NO: 1610 - protein, 119 aa, Artificial Sequence
  Description of Artificial Sequence: Synthetic polypeptide
EVQLLESGGGLVQPGGSLRLSCAASGFTFSNSDMSWVRQAPGKGLEWVSAITISGGSTYYADSVKGRFTISRDNSKNTLYLQMNSLRAEDTAVYYCARGRGGSGWLDYWGQGTLVTVSS

SEQ ID NO: 1611 - protein, 119 aa, Artificial Sequence
  Description of Artificial Sequence: Synthetic polypeptide
EVQLLESGGGLVQPGGSLRLSCAASGFTFSNSDMSWVRQAPGKGLEWVSGISISGGSTYYADSVKGRFTISRDNSKNTLYLQMNSLRAEDTAVYYCARGRGGSGWLDYWGQGTLVTVSS

SEQ ID NO: 1612 - protein, 119 aa, Artificial Sequence
  Description of Artificial Sequence: Synthetic polypeptide
EVQLLESGGGLVQPGGSLRLSCAASGFTFSNSDMSWVRQAPGKGLEWVSGITGSGGSTYYADSVKGRFTISRDNSKNTLYLQMNSLRAEDTAVYYCARGRGGSGWLDYWGQGTLVTVSS

SEQ ID NO: 1613 - protein, 119 aa, Artificial Sequence
  Description of Artificial Sequence: Synthetic polypeptide
EVQLLESGGGLVQPGGSLRLSCAASGFTFSSYAMSWVRQAPGKGLEWVSAISGSGGSTYYADSVKGRFTISRDNSKNTLYLQMNSLRAEDTAVYYCARGRGGSGWLDYWGQGTLVTVSS

SEQ ID NO: 1614 - protein, 113 aa, Artificial Sequence
  Description of Artificial Sequence: Synthetic polypeptide
DIVMTQSPDSLAVSLGERATINCKSSQSVLYSSNNKNYLAWYQQKPGQPPKLLIYWASTRESGVPDRFSGSGSGTDFTLTISSLQAEDVAVYYCQQYYTTPPTFGQGTRLEIK

SEQ ID NO: 1615 - protein, 113 aa, Artificial Sequence
  Description of Artificial Sequence: Synthetic polypeptide
DIVMTQSPDSLAVSLGERATINCKSSQSVLYSPNNKNYLAWYQQKPGQPPKLLIYWASTRESGVPDRFSGSGSGTDFTLTISSLQAEDVAVYYCQQYYSTPPTFGQGTRLEIK

SEQ ID NO: 1616 - protein, 113 aa, Artificial Sequence
  Description of Artificial Sequence: Synthetic polypeptide
DIVMTQSPDSLAVSLGERATINCKSSQSVLYSPNNKNYLAWYQQKPGQPPKLLIYWASTRESGVPDRFSGSGSGTDFTLTISSLQAEDVAVYYCQQYYTTPLTFGQGTRLEIK

SEQ ID NO: 1617 - protein, 113 aa, Artificial Sequence
  Description of Artificial Sequence: Synthetic polypeptide
DIVMTQSPDSLAVSLGERATINCKSSQSVLYSSNNKNYLAWYQQKPGQPPKLLIYWASTRESGVPDRFSGSGSGTDFTLTISSLQAEDVAVYYCQQYYSTPLTFGQGTRLEIK

SEQ ID NO: 1618 - protein, 119 aa, Artificial Sequence
  Description of Artificial Sequence: Synthetic polypeptide
EVQLLESGGGLVQPGGSLRLSCAASGFTFSNSDMSWVRQAPGKGLEWVSGITISGGSTYYADSVKGRFTISRDNSKNTLYLQMNSLRAEDTAVYYCARGRGGSGWLDYWGQGTAVTVSS

SEQ ID NO: 1619 - protein, 119 aa, Artificial Sequence
  Description of Artificial Sequence: Synthetic polypeptide
EVQLLESGGGLVQPGGSLRLSCAASGFTFSNSDMSWVRQAPGKGLEWVSGITISGGSTYYADSVKGRFTISRDNSKNTLYLQMNSLRAEDTAVYYCARGRGGSGWLDYWGQGTDVTVSS

SEQ ID NO: 1620 - protein, 119 aa, Artificial Sequence
  Description of Artificial Sequence: Synthetic polypeptide
EVQLLESGGGLVQPGGSLRLSCAASGFTFSNSDMSWVRQAPGKGLEWVSGITISGGSTYYADSVKGRFTISRDNSKNTLYLQMNSLRAEDTAVYYCARGRGGSGWLDYWGQGTSVTVSS

SEQ ID NO: 1621 - protein, 119 aa, Artificial Sequence
  Description of Artificial Sequence: Synthetic polypeptide
EVQLLESGGGLVQPGGSLRLSCAASGFTFSNSDMSWVRQAPGKGLEWVSGITISGGSTYYADSVKGRFTISRDNSKNTLYLQMNSLRAEDTAVYYCARGSGGSGWLDYWGQGTLVTVSS

SEQ ID NO: 1622 - protein, 119 aa, Artificial Sequence
  Description of Artificial Sequence: Synthetic polypeptide
EVQLLESGGGLVQPGGSLRLSCAASGFTFSNSDMSWVRQAPGKGLEWVSGITISGGSTYYADSVKGRFTISRDNSKNTLYLQMNSLRAEDTAVYYCARGTGGSGWLDYWGQGTLVTVSS

SEQ ID NO: 1623 - protein, 119 aa, Artificial Sequence
  Description of Artificial Sequence: Synthetic polypeptide
EVQLLESGGGLVQPGGSLRLSCAASGFTFSNSDMSWVRQAPGKGLEWVSGITISGGSTYYADSVKGRFTISRDNSKNTLYLQMNSLRAEDTAVYYCARGRGGSGALDYWGQGTLVTVSS

SEQ ID NO: 1624 - protein, 119 aa, Artificial Sequence
  Description of Artificial Sequence: Synthetic polypeptide
EVQLLESGGGLVQPGGSLRLSCAASGFTFSNSDMSWVRQAPGKGLEWVSGITISGGSTYYADSVKGRFTISRDNSKNTLYLQMNSLRAEDTAVYYCARGRGGSGDLDYWGQGTLVTVSS

SEQ ID NO: 1625 - protein, 113 aa, Artificial Sequence
  Description of Artificial Sequence: Synthetic polypeptide
DIVMTQSPDSLAVSLGERATINCKSSQSVLYSPNNSNYLAWYQQKPGQPPKLLIYWASTRESGVPDRFSGSGSGTDFTLTISSLQAEDVAVYYCQQYYTTPPTFGQGTRLEIK

SEQ ID NO: 1626 - protein, 113 aa, Artificial Sequence
  Description of Artificial Sequence: Synthetic polypeptide
DIVMTQSPDSLAVSLGERATINCKSSQSVLYSPNNKNYLAWYQQKPGQPPKLLIYDASTRESGVPDRFSGSGSGTDFTLTISSLQAEDVAVYYCQQYYTTPPTFGQGTRLEIK

SEQ ID NO: 1627 - protein, 113 aa, Artificial Sequence
  Description of Artificial Sequence: Synthetic polypeptide
DIVMTQSPDSLAVSLGERATINCKSSQSVLYSPNNKNYLAWYQQKPGQPPKLLIYSASTRESGVPDRFSGSGSGTDFTLTISSLQAEDVAVYYCQQYYTTPPTFGQGTRLEIK

SEQ ID NO: 1628 - protein, 113 aa, Artificial Sequence
  Description of Artificial Sequence: Synthetic polypeptide
DIVMTQSPDSLAVSLGERATINCKSSQSVLASPNNKNYLAWYQQKPGQPPKLLIYWASTRESGVPDRFSGSGSGTDFTLTISSLQAEDVAVYYCQQYYTTPPTFGQGTRLEIK

SEQ ID NO: 1629 - protein, 113 aa, Artificial Sequence
  Description of Artificial Sequence: Synthetic polypeptide
DIVMTQSPDSLAVSLGERATINCKSSQSVLYSPNNKNTLAWYQQKPGQPPKLLIYWASTRESGVPDRFSGSGSGTDFTLTISSLQAEDVAVYYCQQYYTTPPTFGQGTRLEIK

SEQ ID NO: 1630 - protein, 113 aa, Artificial Sequence
  Description of Artificial Sequence: Synthetic polypeptide
DIVMTQSPDSLAVSLGERATINCKSSQSVLYSPNNKNYLAWYQQKPGQPPKLLISWASTRESGVPDRFSGSGSGTDFTLTISSLQAEDVAVYYCQQYYTTPPTFGQGTRLEIK

SEQ ID NO: 1631 - protein, 113 aa, Artificial Sequence
  Description of Artificial Sequence: Synthetic polypeptide
DIVMTQSPDSLAVSLGERATINCKSSQSVLYSPNNKNYLAWYQQKPGQPPKLLIYWASTRESGVPDRFSGSGSGTDFTLTISSLQAEDVAVYYCQQYETTPPTFGQGTRLEIK

SEQ ID NO: 1632 - protein, 113 aa, Artificial Sequence
  Description of Artificial Sequence: Synthetic polypeptide
DIVMTQSPDSLAVSLGERATINCKSSQSVLYSPNNKNYLAWYQQKPGQPPKLLIYWASTRESGVPDRFSGSGSGTDFTLTISSLQAEDVAVYYCQQYSTTPPTFGQGTRLEIK

SEQ ID NO: 1633 - protein, 119 aa, Artificial Sequence
  Description of Artificial Sequence: Synthetic polypeptide
EVQLLESGGGLVQPGGSLRLSCAASGFTFSNSDMSWVRQAPGKGLEWVSGITISGGSTYYAASVKGRFTISRDNSKNTLYLQMNSLRAEDTAVYYCARGRGGSGWLDYWGQGTLVTVSS

SEQ ID NO: 1634 - protein, 119 aa, Artificial Sequence
  Description of Artificial Sequence: Synthetic polypeptide
EVQLLESGGGLVQPGGSLRLSCAASGFTFSNSDMSWVRQAPGKGLEWVSGITISGGSTYYAQSVKGRFTISRDNSKNTLYLQMNSLRAEDTAVYYCARGRGGSGWLDYWGQGTLVTVSS

SEQ ID NO: 1635 - protein, 119 aa, Artificial Sequence
  Description of Artificial Sequence: Synthetic polypeptide
EVQLLESGGGLVQPGGSLRLSCAASGFTFSNSDMSWVRQAPGKGLEWVSGITISGGSTYYADSVRGRFTISRDNSKNTLYLQMNSLRAEDTAVYYCARGRGGSGWLDYWGQGTLVTVSS

SEQ ID NO: 1636 - protein, 119 aa, Artificial Sequence
  Description of Artificial Sequence: Synthetic polypeptide
EVQLLESGGGLVQPGGSLRLSCAASGFTFSASDMSWVRQAPGKGLEWVSGITISGGSTYYADSVKGRFTISRDNSKNTLYLQMNSLRAEDTAVYYCARGRGGSGWLDYWGQGTLVTVSS

SEQ ID NO: 1637 - protein, 119 aa, Artificial Sequence
  Description of Artificial Sequence: Synthetic polypeptide
EVQLLESGGGLVQPGGSLRLSCAASGFTFSQSDMSWVRQAPGKGLEWVSGITISGGSTYYADSVKGRFTISRDNSKNTLYLQMNSLRAEDTAVYYCARGRGGSGWLDYWGQGTLVTVSS

SEQ ID NO: 1638 - protein, 113 aa, Artificial Sequence
  Description of Artificial Sequence: Synthetic polypeptide
DIVMTQSPDSLAVSLGERATINCKSSQSVLYSSNNRNYLAWYQQKPGQPPKLLIYWASTRESGVPDRFSGSGSGTDFTLTISSLQAEDVAVYYCQQYYSTPPTFGQGTRLEIK

SEQ ID NO: 1639 - protein, 113 aa, Artificial Sequence
  Description of Artificial Sequence: Synthetic polypeptide
DIVMTQSPDSLAVSLGERATINCKSSQSVLYSSNARNYLAWYQQKPGQPPKLLIYWASTRESGVPDRFSGSGSGTDFTLTISSLQAEDVAVYYCQQYYSTPPTFGQGTRLEIK

SEQ ID NO: 1640 - protein, 113 aa, Artificial Sequence
  Description of Artificial Sequence: Synthetic polypeptide
DIVMTQSPDSLAVSLGERATINCKSSQSVLYSSNAKNYLAWYQQKPGQPPKLLIYWASTRESGVPDRFSGSGSGTDFTLTISSLQAEDVAVYYCQQYYSTPPTFGQGTRLEIK

SEQ ID NO: 1641 - protein, 113 aa, Artificial Sequence
  Description of Artificial Sequence: Synthetic polypeptide
DIVMTQSPDSLAVSLGERATINCKSSQSVLYSSNQRNYLAWYQQKPGQPPKLLIYWASTRESGVPDRFSGSGSGTDFTLTISSLQAEDVAVYYCQQYYSTPPTFGQGTRLEIK

SEQ ID NO: 1642 - protein, 113 aa, Artificial Sequence
  Description of Artificial Sequence: Synthetic polypeptide
DIVMTQSPDSLAVSLGERATINCKSSQSVLYSSNQKNYLAWYQQKPGQPPKLLIYWASTRESGVPDRFSGSGSGTDFTLTISSLQAEDVAVYYCQQYYSTPPTFGQGTRLEIK

SEQ ID NO: 1643 - protein, 119 aa, Artificial Sequence
  Description of Artificial Sequence: Synthetic polypeptide
EVQLLESGGGLVQPGGSLRLSCAASGFTFSSYDMSWVRQAPGKGLEWVSGITISGGSTYYADSVKGRFTISRDNSKNTLYLQMNSLRAEDTAVYYCARGRGGSGWLDYWGQGTLVTVSS

SEQ ID NO: 1644 - protein, 119 aa, Artificial Sequence
  Description of Artificial Sequence: Synthetic polypeptide
EVQLLESGGGLVQPGGSLRLSCAASGFTFSSYDMSWVRQAPGKGLEWVSAITISGGSTYYADSVKGRFTISRDNSKNTLYLQMNSLRAEDTAVYYCARGRGGSGWLDYWGQGTLVTVSS

SEQ ID NO: 1645 - protein, 119 aa, Artificial Sequence
  Description of Artificial Sequence: Synthetic polypeptide
EVQLLESGGGLVQPGGSLRLSCAASGFTFSSYDMSWVRQAPGKGLEWVSGISISGGSTYYADSVKGRFTISRDNSKNTLYLQMNSLRAEDTAVYYCARGRGGSGWLDYWGQGTLVTVSS

SEQ ID NO: 1646 - protein, 119 aa, Artificial Sequence
  Description of Artificial Sequence: Synthetic polypeptide
EVQLLESGGGLVQPGGSLRLSCAASGFTFSSYDMSWVRQAPGKGLEWVSGITGSGGSTYYADSVKGRFTISRDNSKNTLYLQMNSLRAEDTAVYYCARGRGGSGWLDYWGQGTLVTVSS

SEQ ID NO: 1647 - protein, 119 aa, Artificial Sequence
  Description of Artificial Sequence: Synthetic polypeptide
EVQLLESGGGLVQPGGSLRLSCAASGFTFSSYDMSWVRQAPGKGLEWVSAISISGGSTYYADSVKGRFTISRDNSKNTLYLQMNSLRAEDTAVYYCARGRGGSGWLDYWGQGTLVTVSS

SEQ ID NO: 1648 - protein, 119 aa, Artificial Sequence
  Description of Artificial Sequence: Synthetic polypeptide
EVQLLESGGGLVQPGGSLRLSCAASGFTFSSYDMSWVRQAPGKGLEWVSAITGSGGSTYYADSVKGRFTISRDNSKNTLYLQMNSLRAEDTAVYYCARGRGGSGWLDYWGQGTLVTVSS

SEQ ID NO: 1649 - protein, 119 aa, Artificial Sequence
  Description of Artificial Sequence: Synthetic polypeptide
EVQLLESGGGLVQPGGSLRLSCAASGFTFSSYDMSWVRQAPGKGLEWVSGISGSGGSTYYADSVKGRFTISRDNSKNTLYLQMNSLRAEDTAVYYCARGRGGSGWLDYWGQGTLVTVSS

SEQ ID NO: 1650 - protein, 119 aa, Artificial Sequence
  Description of Artificial Sequence: Synthetic polypeptide
EVQLLESGGGLVQPGGSLRLSCAASGFTFSSYAMSWVRQAPGKGLEWVSGISGSGGSTYYADSVKGRFTISRDNSKNTLYLQMNSLRAEDTAVYYCARGRGGSGWLDYWGQGTLVTVSS

SEQ ID NO: 1651 - protein, 119 aa, Artificial Sequence
  Description of Artificial Sequence: Synthetic polypeptide
EVQLLESGGGLVQPGGSLRLSCAASGFTFSNSDMSWVRQAPGKGLEWVSAISGSGGSTYYADSVKGRFTISRDNSKNTLYLQMNSLRAEDTAVYYCARGRGGSGWLDYWGQGTLVTVSS

SEQ ID NO: 1652 - protein, 119 aa, Artificial Sequence
  Description of Artificial Sequence: Synthetic polypeptide
EVQLLESGGGLVQPGGSLRLSCAASGFTFSSYDMSWVRQAPGKGLEWVSAISGSGGSTYYADSVKGRFTISRDNSKNTLYLQMNSLRAEDTAVYYCARGRGGSGWLDYWGQGTLVTVSS

SEQ ID NO: 1653 - protein, 119 aa, Artificial Sequence
  Description of Artificial Sequence: Synthetic polypeptide
EVQLLESGGGLVQPGGSLRLSCAASGFTFSSYDMSWVRQAPGKGLEWVSGITISGGSTYYADSVKGRFTISRDNSKNTLYLQMNSLRAEDTAVYYCARGRGGSGWLDYWGQGTDVTVSS

SEQ ID NO: 1654 - protein, 125 aa, Artificial Sequence
  Description of Artificial Sequence: Synthetic polypeptide
QVQLVQSGAEVKKPGASVKVSCKASGYTFTDHYMHWVRQAPGQGLEWMGTIAPSGGRTSYAQKFQGRVTMTRDTSTSTVYMELSSLRSEDTAVYYCAADNGHASGWLYYYGMDVWGQGTTVTVSS

SEQ ID NO: 1655 - protein, 107 aa, Artificial Sequence
  Description of Artificial Sequence: Synthetic polypeptide
DIQMTQSPSSLSASVGDRVTITCRASQSISNWVAWYQQKPGKAPKLLIYRASTLQSGVPSRFSGSGSGTDFTLTISSLQPEDFATYYCQQSHSLPLTFGPGTKVDIK

SEQ ID NO: 1656 - protein, 125 aa, Artificial Sequence
  Description of Artificial Sequence: Synthetic polypeptide
QVQLVQSGAEVKKPGASVKVSCKASGYTFSSHYMHWVRQAPGQGLEWMGTIAPSGGRTSYAQKFQGRVTMTRDTSTSTVYMELSSLRSEDTAVYYCAADNGHASGWLYYYGMDVWGQGTTVTVSS

SEQ ID NO: 1657 - protein, 125 aa, Artificial Sequence
  Description of Artificial Sequence: Synthetic polypeptide
QVQLVQSGAEVKKPGASVKVSCKASGYTFSDYYMHWVRQAPGQGLEWMGTIAPSGGRTSYAQKFQGRVTMTRDTSTSTVYMELSSLRSEDTAVYYCAADNGHASGWLYYYGMDVWGQGTTVTVSS

SEQ ID NO: 1658 - protein, 125 aa, Artificial Sequence
  Description of Artificial Sequence: Synthetic polypeptide
QVQLVQSGAEVKKPGASVKVSCKASGYTFSDHYMHWVRQAPGQGLEWMGIIAPSGGRTSYAQKFQGRVTMTRDTSTSTVYMELSSLRSEDTAVYYCAADNGHASGWLYYYGMDVWGQGTTVTVSS

SEQ ID NO: 1659 - protein, 125 aa, Artificial Sequence
  Description of Artificial Sequence: Synthetic polypeptide
QVQLVQSGAEVKKPGASVKVSCKASGYTFSDHYMHWVRQAPGQGLEWMGTIAPSGGSTSYAQKFQGRVTMTRDTSTSTVYMELSSLRSEDTAVYYCAADNGHASGWLYYYGMDVWGQGTTVTVSS

SEQ ID NO: 1660 - protein, 125 aa, Artificial Sequence
  Description of Artificial Sequence: Synthetic polypeptide
QVQLVQSGAEVKKPGASVKVSCKASGYTFTSYYMHWVRQAPGQGLEWMGIIAPSGGSTSYAQKFQGRVTMTRDTSTSTVYMELSSLRSEDTAVYYCAADNGHASGWLYYYGMDVWGQGTTVTVSS

SEQ ID NO: 1661 - protein, 125 aa, Artificial Sequence
  Description of Artificial Sequence: Synthetic polypeptide
QVQLVQSGAEVKKPGASVKVSCKASGYTFSDHYMHWVRQAPGQGLEWMGTIAPSGGRTSYAQKFQGRVTMTRDTSTSTVYMELSSLRSEDTAVYYCAADNGHASGWLYYYGMDVWGQGTTVTVSS

SEQ ID NO: 1662 - protein, 107 aa, Artificial Sequence
  Description of Artificial Sequence: Synthetic polypeptide
DIQMTQSPSSLSASVGDRVTITCRASQSISSWVAWYQQKPGKAPKLLIYRASTLQSGVPSRFSGSGSGTDFTLTISSLQPEDFATYYCQQSHSLPLTFGPGTKVDIK

SEQ ID NO: 1663 - protein, 107 aa, Artificial Sequence
  Description of Artificial Sequence: Synthetic polypeptide
DIQMTQSPSSLSASVGDRVTITCRASQSISNYVAWYQQKPGKAPKLLIYRASTLQSGVPSRFSGSGSGTDFTLTISSLQPEDFATYYCQQSHSLPLTFGPGTKVDIK

SEQ ID NO: 1664 - protein, 107 aa, Artificial Sequence
  Description of Artificial Sequence: Synthetic polypeptide
DIQMTQSPSSLSASVGDRVTITCRASQSISNWLAWYQQKPGKAPKLLIYRASTLQSGVPSRFSGSGSGTDFTLTISSLQPEDFATYYCQQSHSLPLTFGPGTKVDIK

SEQ ID NO: 1665 - protein, 107 aa, Artificial Sequence
  Description of Artificial Sequence: Synthetic polypeptide
DIQMTQSPSSLSASVGDRVTITCRASQSISNWVNWYQQKPGKAPKLLIYRASTLQSGVPSRFSGSGSGTDFTLTISSLQPEDFATYYCQQSHSLPLTFGPGTKVDIK

SEQ ID NO: 1666 - protein, 107 aa, Artificial Sequence
  Description of Artificial Sequence: Synthetic polypeptide
DIQMTQSPSSLSASVGDRVTITCRASQSISNWVAWYQQKPGKAPKLLIYAASTLQSGVPSRFSGSGSGTDFTLTISSLQPEDFATYYCQQSHSLPLTFGPGTKVDIK

SEQ ID NO: 1667 - protein, 107 aa, Artificial Sequence
  Description of Artificial Sequence: Synthetic polypeptide
DIQMTQSPSSLSASVGDRVTITCRASQSISNWVAWYQQKPGKAPKLLIYRASSLQSGVPSRFSGSGSGTDFTLTISSLQPEDFATYYCQQSHSLPLTFGPGTKVDIK

SEQ ID NO: 1668 - protein, 107 aa, Artificial Sequence
  Description of Artificial Sequence: Synthetic polypeptide
DIQMTQSPSSLSASVGDRVTITCRASQSISNWVAWYQQKPGKAPKLLIYRASTLQSGVPSRFSGSGSGTDFTLTISSLQPEDFATYYCQQSYSLPLTFGPGTKVDIK

SEQ ID NO: 1669 - protein, 107 aa, Artificial Sequence
  Description of Artificial Sequence: Synthetic polypeptide
DIQMTQSPSSLSASVGDRVTITCRASQSISNWVAWYQQKPGKAPKLLIYRASTLQSGVPSRFSGSGSGTDFTLTISSLQPEDFATYYCQQSHSTPLTFGPGTKVDIK

SEQ ID NO: 1670 - protein, 107 aa, Artificial Sequence
  Description of Artificial Sequence: Synthetic polypeptide
DIQMTQSPSSLSASVGDRVTITCRASQSISNWVAWYQQKPGKAPKLLIYRASTLQSGVPSRFSGSGSGTDFTLTISSLQPEDFATYYCQQSHSLPRTFGPGTKVDIK

SEQ ID NO: 1671 - protein, 125 aa, Artificial Sequence
  Description of Artificial Sequence: Synthetic polypeptide
QVQLVQSGAEVKKPGASVKVSCKASGYTFTSHYMHWVRQAPGQGLEWMGTIAPSGGRTSYAQKFQGRVTMTRDTSTSTVYMELSSLRSEDTAVYYCAADNGHASGWLYYYGMDVWGQGTTVTVSS

SEQ ID NO: 1672 - protein, 125 aa, Artificial Sequence
  Description of Artificial Sequence: Synthetic polypeptide
QVQLVQSGAEVKKPGASVKVSCKASGYTFTDYYMHWVRQAPGQGLEWMGTIAPSGGRTSYAQKFQGRVTMTRDTSTSTVYMELSSLRSEDTAVYYCAADNGHASGWLYYYGMDVWGQGTTVTVSS

SEQ ID NO: 1673 - protein, 125 aa, Artificial Sequence
  Description of Artificial Sequence: Synthetic polypeptide
QVQLVQSGAEVKKPGASVKVSCKASGYTFTDHYMHWVRQAPGQGLEWMGTIAPSGGSTSYAQKFQGRVTMTRDTSTSTVYMELSSLRSEDTAVYYCAADNGHASGWLYYYGMDVWGQGTTVTVSS

SEQ ID NO: 1674 - protein, 125 aa, Artificial Sequence
  Description of Artificial Sequence: Synthetic polypeptide
QVQLVQSGAEVKKPGASVKVSCKASGYTFTSYYMHWVRQAPGQGLEWMGTIAPSGGRTSYAQKFQGRVTMTRDTSTSTVYMELSSLRSEDTAVYYCAADNGHASGWLYYYGMDVWGQGTTVTVSS

SEQ ID NO: 1675 - protein, 125 aa, Artificial Sequence
  Description of Artificial Sequence: Synthetic polypeptide
QVQLVQSGAEVKKPGASVKVSCKASGYTFTSYYMHWVRQAPGQGLEWMGTIAPSGGSTSYAQKFQGRVTMTRDTSTSTVYMELSSLRSEDTAVYYCAADNGHASGWLYYYGMDVWGQGTTVTVSS

SEQ ID NO: 1676 - protein, 107 aa, Artificial Sequence
  Description of Artificial Sequence: Synthetic polypeptide
DIQMTQSPSSLSASVGDRVTITCRASQSISSYVAWYQQKPGKAPKLLIYRASTLQSGVPSRFSGSGSGTDFTLTISSLQPEDFATYYCQQSHSLPLTFGPGTKVDIK

SEQ ID NO: 1677 - protein, 107 aa, Artificial Sequence
  Description of Artificial Sequence: Synthetic polypeptide
DIQMTQSPSSLSASVGDRVTITCRASQSISSWLAWYQQKPGKAPKLLIYRASTLQSGVPSRFSGSGSGTDFTLTISSLQPEDFATYYCQQSHSLPLTFGPGTKVDIK

SEQ ID NO: 1678 - protein, 107 aa, Artificial Sequence
  Description of Artificial Sequence: Synthetic polypeptide
DIQMTQSPSSLSASVGDRVTITCRASQSISSYLAWYQQKPGKAPKLLIYRASTLQSGVPSRFSGSGSGTDFTLTISSLQPEDFATYYCQQSHSLPLTFGPGTKVDIK

SEQ ID NO: 1679 - protein, 113 aa, Artificial Sequence
  Description of Artificial Sequence: Synthetic polypeptide
QVQLVQSGAEVKKPGASVKVSCKASGYTFTTYYMHWVRQAPGQGLEWMGIIQPSGGSTSYAQKFQGRVTMTRDTSTSTVYMELSSLRSEDTAVYYCASGWVYWGQGTLVTVSS

SEQ ID NO: 1680 - protein, 107 aa, Artificial Sequence
  Description of Artificial Sequence: Synthetic polypeptide
DIQMTQSPSSLSASVGDRVTITCRASQSISNYLAWYQQKPGKAPKLLIYAASSLQSGVPSRFSGSGSGTDFTLTISSLQPEDFATYYCQQSYSTPPTFGPGTKVDIK

SEQ ID NO: 1681 - protein, 107 aa, Artificial Sequence
  Description of Artificial Sequence: Synthetic polypeptide
DIQMTQSPSSLSASVGDRVTITCRASQSIKSYLAWYQQKPGKAPKLLIYAASSLQSGVPSRFSGSGSGTDFTLTISSLQPEDFATYYCQQSYSTPPTFGPGTKVDIK

SEQ ID NO: 1682 - protein, 107 aa, Artificial Sequence
  Description of Artificial Sequence: Synthetic polypeptide
DIQMTQSPSSLSASVGDRVTITCRASQDISSYLAWYQQKPGKAPKLLIYAASSLQSGVPSRFSGSGSGTDFTLTISSLQPEDFATYYCQQSYSTPPTFGPGTKVDIK

SEQ ID NO: 1683 - protein, 107 aa, Artificial Sequence
  Description of Artificial Sequence: Synthetic polypeptide
DIQMTQSPSSLSASVGDRVTITCRASRSISSYLAWYQQKPGKAPKLLIYAASSLQSGVPSRFSGSGSGTDFTLTISSLQPEDFATYYCQQSYSTPPTFGPGTKVDIK

SEQ ID NO: 1684 - protein, 107 aa, Artificial Sequence
  Description of Artificial Sequence: Synthetic polypeptide
DIQMTQSPSSLSASVGDRVTITCQASQSISSYLAWYQQKPGKAPKLLIYAASSLQSGVPSRFSGSGSGTDFTLTISSLQPEDFATYYCQQSYSTPPTFGPGTKVDIK

SEQ ID NO: 1685 - protein, 113 aa, Artificial Sequence
  Description of Artificial Sequence: Synthetic polypeptide
QVQLVQSGAEVKKPGASVKVSCKASGYSFTSYYMHWVRQAPGQGLEWMGIIQPSGGSTSYAQKFQGRVTMTRDTSTSTVYMELSSLRSEDTAVYYCASGWVYWGQGTLVTVSS

SEQ ID NO: 1686 - protein, 113 aa, Artificial Sequence
  Description of Artificial Sequence: Synthetic polypeptide
QVQLVQSGAEVKKPGASVKVSCKASGYTFTSYYMHWVRQAPGQGLEWMGIIQPSGGSTSYAQKFQGRVTMTRDTSTSTVYMELSSLRSEDTAVYYCASGWVYWGQGTLVTVSS

SEQ ID NO: 1687 - protein, 107 aa, Artificial Sequence
  Description of Artificial Sequence: Synthetic polypeptide
DIQMTQSPSSLSASVGDRVTITCRASQDIKNYLAWYQQKPGKAPKLLIYAASSLQSGVPSRFSGSGSGTDFTLTISSLQPEDFATYYCQQSYSTPPTFGPGTKVDIK

SEQ ID NO: 1688 - protein, 107 aa, Artificial Sequence
  Description of Artificial Sequence: Synthetic polypeptide
DIQMTQSPSSLSASVGDRVTITCRRVGSIKNYLAWYQQKPGKAPKLLIYAASSLQSGVPSRFSGSGSGTDFTLTISSLQPEDFATYYCQQSYSTPPTFGPGTKVDIK

SEQ ID NO: 1689 - protein, 107 aa, Artificial Sequence
  Description of Artificial Sequence: Synthetic polypeptide
DIQMTQSPSSLSASVGDRVTITCRASRDISNYLAWYQQKPGKAPKLLIYAASSLQSGVPSRFSGSGSGTDFTLTISSLQPEDFATYYCQQSYSTPPTFGPGTKVDIK

SEQ ID NO: 1690 - protein, 107 aa, Artificial Sequence
  Description of Artificial Sequence: Synthetic polypeptide
DIQMTQSPSSLSASVGDRVTITCRASRDIKSYLAWYQQKPGKAPKLLIYAASSLQSGVPSRFSGSGSGTDFTLTISSLQPEDFATYYCQQSYSTPPTFGPGTKVDIK

SEQ ID NO: 1691 - protein, 107 aa, Artificial Sequence
  Description of Artificial Sequence: Synthetic polypeptide
DIQMTQSPSSLSASVGDRVTITCQASQSIKNYLAWYQQKPGKAPKLLIYAASSLQSGVPSRFSGSGSGTDFTLTISSLQPEDFATYYCQQSYSTPPTFGPGTKVDIK

SEQ ID NO: 1692 - protein, 107 aa, Artificial Sequence
  Description of Artificial Sequence: Synthetic polypeptide
DIQMTQSPSSLSASVGDRVTITCQASQDISNYLAWYQQKPGKAPKLLIYAASSLQSGVPSRFSGSGSGTDFTLTISSLQPEDFATYYCQQSYSTPPTFGPGTKVDIK

SEQ ID NO: 1693 - protein, 107 aa, Artificial Sequence
  Description of Artificial Sequence: Synthetic polypeptide
DIQMTQSPSSLSASVGDRVTITCQASQDIKSYLAWYQQKPGKAPKLLIYAASSLQSGVPSRFSGSGSGTDFTLTISSLQPEDFATYYCQQSYSTPPTFGPGTKVDIK

SEQ ID NO: 1694 - protein, 107 aa, Artificial Sequence
  Description of Artificial Sequence: Synthetic polypeptide
DIQMTQSPSSLSASVGDRVTITCQASRSISNYLAWYQQKPGKAPKLLIYAASSLQSGVPSRFSGSGSGTDFTLTISSLQPEDFATYYCQQSYSTPPTFGPGTKVDIK

SEQ ID NO: 1695 - protein, 107 aa, Artificial Sequence
  Description of Artificial Sequence: Synthetic polypeptide
DIQMTQSPSSLSASVGDRVTITCQASRSIKSYLAWYQQKPGKAPKLLIYAASSLQSGVPSRFSGSGSGTDFTLTISSLQPEDFATYYCQQSYSTPPTFGPGTKVDIK

SEQ ID NO: 1696 - protein, 107 aa, Artificial Sequence
  Description of Artificial Sequence: Synthetic polypeptide
DIQMTQSPSSLSASVGDRVTITCQASRDISSYLAWYQQKPGKAPKLLIYAASSLQSGVPSRFSGSGSGTDFTLTISSLQPEDFATYYCQQSYSTPPTFGPGTKVDIK

SEQ ID NO: 1697 - protein, 107 aa, Artificial Sequence
  Description of Artificial Sequence: Synthetic polypeptide
DIQMTQSPSSLSASVGDRVTITCRASQSIKNYLAWYQQKPGKAPKLLIYAASSLQSGVPSRFSGSGSGTDFTLTISSLQPEDFATYYCQQSYSTPPTFGPGTKVDIK

SEQ ID NO: 1698 - protein, 107 aa, Artificial Sequence
  Description of Artificial Sequence: Synthetic polypeptide
DIQMTQSPSSLSASVGDRVTITCRASQDISNYLAWYQQKPGKAPKLLIYAASSLQSGVPSRFSGSGSGTDFTLTISSLQPEDFATYYCQQSYSTPPTFGPGTKVDIK

SEQ ID NO: 1699 - protein, 107 aa, Artificial Sequence
  Description of Artificial Sequence: Synthetic polypeptide
DIQMTQSPSSLSASVGDRVTITCRASQDIKSYLAWYQQKPGKAPKLLIYAASSLQSGVPSRFSGSGSGTDFTLTISSLQPEDFATYYCQQSYSTPPTFGPGTKVDIK

SEQ ID NO: 1700 - protein, 107 aa, Artificial Sequence
  Description of Artificial Sequence: Synthetic polypeptide
DIQMTQSPSSLSASVGDRVTITCRASRSISNYLAWYQQKPGKAPKLLIYAASSLQSGVPSRFSGSGSGTDFTLTISSLQPEDFATYYCQQSYSTPPTFGPGTKVDIK

SEQ ID NO: 1701 - protein, 107 aa, Artificial Sequence
  Description of Artificial Sequence: Synthetic polypeptide
DIQMTQSPSSLSASVGDRVTITCRASRSIKSYLAWYQQKPGKAPKLLIYAASSLQSGVPSRFSGSGSGTDFTLTISSLQPEDFATYYCQQSYSTPPTFGPGTKVDIK

SEQ ID NO: 1702 - protein, 107 aa, Artificial Sequence
  Description of Artificial Sequence: Synthetic polypeptide
DIQMTQSPSSLSASVGDRVTITCRASRDISSYLAWYQQKPGKAPKLLIYAASSLQSGVPSRFSGSGSGTDFTLTISSLQPEDFATYYCQQSYSTPPTFGPGTKVDIK

SEQ ID NO: 1703 - protein, 107 aa, Artificial Sequence
  Description of Artificial Sequence: Synthetic polypeptide
DIQMTQSPSSLSASVGDRVTITCQASQSISNYLAWYQQKPGKAPKLLIYAASSLQSGVPSRFSGSGSGTDFTLTISSLQPEDFATYYCQQSYSTPPTFGPGTKVDIK

SEQ ID NO: 1704 - protein, 107 aa, Artificial Sequence
  Description of Artificial Sequence: Synthetic polypeptide
DIQMTQSPSSLSASVGDRVTITCQASQSIKSYLAWYQQKPGKAPKLLIYAASSLQSGVPSRFSGSGSGTDFTLTISSLQPEDFATYYCQQSYSTPPTFGPGTKVDIK

SEQ ID NO: 1705 - protein, 107 aa, Artificial Sequence
  Description of Artificial Sequence: Synthetic polypeptide
DIQMTQSPSSLSASVGDRVTITCQASQDISSYLAWYQQKPGKAPKLLIYAASSLQSGVPSRFSGSGSGTDFTLTISSLQPEDFATYYCQQSYSTPPTFGPGTKVDIK

SEQ ID NO: 1706 - protein, 107 aa, Artificial Sequence
  Description of Artificial Sequence: Synthetic polypeptide
DIQMTQSPSSLSASVGDRVTITCQASRSISSYLAWYQQKPGKAPKLLIYAASSLQSGVPSRFSGSGSGTDFTLTISSLQPEDFATYYCQQSYSTPPTFGPGTKVDIK

SEQ ID NO: 1707 - protein, 113 aa, Artificial Sequence
  Description of Artificial Sequence: Synthetic polypeptide
EVQLVQSGAEVKKPGASVKVSCKASGYTFTTYYMHWVRQAPGQGLEWMGIINPSGGSTSYAQKFQGRVTMTRDTSTSTVYMELSSLRSEDTAVYYCASGWVYWGQGTLVTVSS

SEQ ID NO: 1708 - protein, 113 aa, Artificial Sequence
  Description of Artificial Sequence: Synthetic polypeptide
EVQLVQSGAEVKKPGASVKVSCKASGYSFTTYYMHWVRQAPGQGLEWMGIINPSGGSTSYAQKFQGRVTMTRDTSTSTVYMELSSLRSEDTAVYYCASGWVYWGQGTLVTVSS

SEQ ID NO: 1709 - protein, 5 aa, Artificial Sequence
  Description of Artificial Sequence: Synthetic peptide
SYYMH

SEQ ID NO: 1710 - protein, 8 aa, Artificial Sequence
  Description of Artificial Sequence: Synthetic peptide
GYSFTSYY

SEQ ID NO: 1711 - protein, 7 aa, Artificial Sequence
  Description of Artificial Sequence: Synthetic peptide
GYSFTSY

SEQ ID NO: 1712 - protein, 17 aa, Artificial Sequence
  Description of Artificial Sequence: Synthetic peptide
IINPSGGSTSYAQKFQG

SEQ ID NO: 1713 - protein, 8 aa, Artificial Sequence
  Description of Artificial Sequence: Synthetic peptide
INPSGGST

SEQ ID NO: 1714 - protein, 6 aa, Artificial Sequence
  Description of Artificial Sequence: Synthetic peptide
NPSGGS

SEQ ID NO: 1715 - protein, 6 aa, Artificial Sequence
  Description of Artificial Sequence: Synthetic peptide
ASGWVY

SEQ ID NO: 1716 - protein, 11 aa, Artificial Sequence
  Description of Artificial Sequence: Synthetic peptide
RASQSISSYLA

SEQ ID NO: 1717 - protein, 7 aa, Artificial Sequence
  Description of Artificial Sequence: Synthetic peptide
AASSLQS

SEQ ID NO: 1718 - protein, 9 aa, Artificial Sequence
  Description of Artificial Sequence: Synthetic peptide
QQSYSTPPT

SEQ ID NO: 1719 - protein, 5 aa, Artificial Sequence
  Description of Artificial Sequence: Synthetic peptide
SYDMS

SEQ ID NO: 1720 - protein, 8 aa, Artificial Sequence
  Description of Artificial Sequence: Synthetic peptide
GFTFSSYD

SEQ ID NO: 1721 - protein, 7 aa, Artificial Sequence
  Description of Artificial Sequence: Synthetic peptide
GFTFSSY

SEQ ID NO: 1722 - protein, 7 aa, Artificial Sequence
  Description of Artificial Sequence: Synthetic peptide
ITISGGS

SEQ ID NO: 1723 - protein, 6 aa, Artificial Sequence
  Description of Artificial Sequence: Synthetic peptide
TISGGS

SEQ ID NO: 1724 - protein, 12 aa, Artificial Sequence
  Description of Artificial Sequence: Synthetic peptide
ARGRGGSGWLDY

SEQ ID NO: 1725 - protein, 8 aa, Artificial Sequence
  Description of Artificial Sequence: Synthetic peptide
RGGSGWLD

SEQ ID NO: 1726 - protein, 17 aa, Artificial Sequence
  Description of Artificial Sequence: Synthetic peptide
KSSQSVLYSPNNKNYLA

SEQ ID NO: 1727 - protein, 12 aa, Artificial Sequence
  Description of Artificial Sequence: Synthetic peptide
QSVLYSPNNKNY

SEQ ID NO: 1728 - protein, 7 aa, Artificial Sequence
  Description of Artificial Sequence: Synthetic peptide
WASTRES

SEQ ID NO: 1729 - protein, 9 aa, Artificial Sequence
  Description of Artificial Sequence: Synthetic peptide
QQYYTTPPT

SEQ ID NO: 1730 - protein, 6 aa, Artificial Sequence
  Description of Artificial Sequence: Synthetic peptide
QSISSY

SEQ ID NO: 1731 - protein, 8 aa, Artificial Sequence
  Description of Artificial Sequence: Synthetic peptide
GFTFSSYW

SEQ ID NO: 1732 - protein, 8 aa, Artificial Sequence
  Description of Artificial Sequence: Synthetic peptide
ISGSGGYT

SEQ ID NO: 1733 - protein, 6 aa, Artificial Sequence
  Description of Artificial Sequence: Synthetic peptide
SGSGGY

SEQ ID NO: 1734 - protein, 12 aa, Artificial Sequence
  Description of Artificial Sequence: Synthetic peptide
ARDRPYYYDMDV

SEQ ID NO: 1735 - protein, 10 aa, Artificial Sequence
  Description of Artificial Sequence: Synthetic peptide
DRPYYYDMDV

SEQ ID NO: 1736 - protein, 11 aa, Artificial Sequence
  Description of Artificial Sequence: Synthetic peptide
RASQSISSSLA

SEQ ID NO: 1737 - protein, 6 aa, Artificial Sequence
  Description of Artificial Sequence: Synthetic peptide
QSISSS

SEQ ID NO: 1738 - protein, 9 aa, Artificial Sequence
  Description of Artificial Sequence: Synthetic peptide
QQYKSYPVT

SEQ ID NO: 1739 - protein, 12 aa, Artificial Sequence
  Description of Artificial Sequence: Synthetic peptide
ARDRPYYYDLDV

SEQ ID NO: 1740 - protein, 10 aa, Artificial Sequence
  Description of Artificial Sequence: Synthetic peptide
DRPYYYDLDV

SEQ ID NO: 1741 - protein, 5 aa, Artificial Sequence
  Description of Artificial Sequence: Synthetic peptide
GGGGE

SEQ ID NO: 1742 - protein, 5 aa, Artificial Sequence
  Description of Artificial Sequence: Synthetic peptide
AAAKA

SEQ ID NO: 1743 - protein, 24 aa, Artificial Sequence
  Description of Artificial Sequence: Synthetic peptide
MKWVTFISLLFLFSSAYSRGVFRR

SEQ ID NO: 1744 - protein, 17 aa, Artificial Sequence
  Description of Artificial Sequence: Synthetic peptide
GITISGGSTYYADSVKG

SEQ ID NO: 1745 - protein, 133 aa, Artificial Sequence; identical to SEQ ID NO: 41
  Description of Artificial Sequence: Synthetic polypeptide

SEQ ID NO: 1746 - protein, 226 aa, Artificial Sequence; identical to SEQ ID NO: 21
  Description of Artificial Sequence: Synthetic polypeptide

SEQ ID NO: 1747 - protein, 394 aa, Artificial Sequence
  Description of Artificial Sequence: Synthetic polypeptide
  MOD_RES (134)..(153): This region may encompass one of the following sequences: "GGGGSGGGGSGGGGS" or "GGGGSGGGGSGGGGSGGGGS"
  MOD_RES (380)..(394): This region may encompass one of the following sequences: "GGGGS" or "GGGGSGGGGS" or "GGGGSGGGGSGGGGS"
APTSSSTKKTQLQLEHLLLDLQMILNGINNYKNPKLTRMLTFKFYMPKKATELKHLQCLEEELKPLEEALNLAPSKNFHLRPRDLISDINVIVLELKGSETTFMCEYADETATIVEFINRWITFSQSIISTLTXXXXXXXXXXXXXXXXXXXXDKTHTCPPCPAPEAAGAPSVFLFPPKPKDTLMISRTPEVTCVVVDVSHEDPEVKFNWYVDGVEVHNAKTKPREEQYNSTYRVVSVLTVLHQDWLNGKEYKCKVSNKALPAPIEKTISKAKGQPREPQVYTLPPSREEMTKNQVSLTCLVKGFYPSDIAVEWESNGQPENNYKTTPPVLDSDGSFFLYSKLTVDKSRWQQGNVFSCSVMHEALHNHYTQKSLSLSPGXXXXXXXXXXXXXXX

SEQ ID NO: 1748 - protein, 50 aa, Artificial Sequence
  Description of Artificial Sequence: Synthetic polypeptide
  SITE (1)..(50): This sequence may encompass 1-10 "Gly Gly Gly Gly Ala" repeating units
GGGGAGGGGAGGGGAGGGGAGGGGAGGGGAGGGGAGGGGAGGGGAGGGGA

SEQ ID NO: 1749 - protein, 25 aa, Artificial Sequence
  Description of Artificial Sequence: Synthetic peptide
  SITE (1)..(25): This sequence may encompass 1-5 "Gly Gly Gly Gly Ser" repeating units
GGGGSGGGGSGGGGSGGGGSGGGGS

SEQ ID NO: 1750 - protein, 50 aa, Artificial Sequence
  Description of Artificial Sequence: Synthetic polypeptide
  SITE (1)..(50): This sequence may encompass 1-10 "Gly Gly Gly Gly Ser" repeating units
GGGGSGGGGSGGGGSGGGGSGGGGSGGGGSGGGGSGGGGSGGGGSGGGGS

SEQ ID NO: 1751 - protein, 220 aa, Artificial Sequence
  Description of Artificial Sequence: Synthetic polypeptide
DIVMTQSPDSLAVSLGERATINCKSSQSVLYSPNNKNYLAWYQQKPGQPPKLLIYWASTRESGVPDRFSGSGSGTDFTLTISSLQAEDVAVYYCQQYYTTPPTFGQGTRLEIKRTVAAPSVFIFPPSDEQLKSGTASVVCLLNNFYPREAKVQWKVDNALQSGNSQESVTEQDSKDSTYSLSSTLTLSKADYEKHKVYACEVTHQGLSSPVTKSFNRGEC

SEQ ID NO: 1752 - protein, 709 aa, Artificial Sequence
  Description of Artificial Sequence: Synthetic polypeptide
EVQLLESGGGLVQPGGSLRLSCAASGFTFSSYDMSWVRQAPGKGLEWVSGITISGGSTYYADSVKGRFTISRDNSKNTLYLQMNSLRAEDTAVYYCARGRGGSGWLDYWGQGTTVTVSSASTKGPSVFPLAPSSKSTSGGTAALGCLVKDYFPEPVTVSWNSGALTSGVHTFPAVLQSSGLYSLSSVVTVPSSSLGTQTYICNVNHKPSNTKVDKKVEPKSCDKTHTCPPCPAPEAAGAPSVFLFPPKPKDTLMISRTPEVTCVVVDVSHEDPEVKFNWYVDGVEVHNAKTKPREEQYNSTYRVVSVLTVLHQDWLNGKEYKCKVSNKALPAPIEKTISKAKGQPREPQVYTLPPSREEMTKNQVSLTCLVKGFYPSDIAVEWESNGQPENNYKTTPPVLDSDGSFFLYSKLTVDKSRWQQGNVFSCSVMHEALHNHYTQKSLSLSPGGGGGSGGGGSGGGGSEVQLLESGGGLVQPGGSLRLSCAASGFTFSSYWMHWVRQAPGKGLEWVSYISGSGGYTNYADSVKGRFTISRDNSKNTLYLQMNSLRAEDTAVYYCARDRPYYYDMDVWGKGTTVTVSSGGGGSGGGGSGGGGSGGGGSDIQMTQSPSSLSASVGDRVTITCRASQSISSSLAWYQQKPGKAPKLLIYAASSLQSGVPSRFSGSGSGTDFTLTISSLQPEDFATYYCQQYKSYPVTFGQGTKVEIK
